United States Patent Application Publication US 2025/0235397 A1 - sequence listing, part 7

SEQ ID NO: 11 - DNA, 4093470 bp, Bacillus amyloliquefaciens (residues 2,046,736-4,093,470 of 4,093,470)
  source 1..4093470: mol_type = genomic DNA
gacccgccagctgaatcgccttaccggaccctaaaaacaacccggtgccgatcgtgccgccaatggcgataagctgcacatgccgattcgataagtccctctttagctctcgctgttccacatctgactcctccttacttttttatgaacgacgagaaaataaagccaataaaaaaagagattggatgccctccaatctcatggtcataagaatatcaaattatatttgcgccgctgacaatcaacagcatgacaaatacatattcggtactcttctgtccttttgcctgagattgtgaacccttcggcgccgcggaaaatccgcggtctctccagaagccgctcctgctgtagtgcgacccacagcaatcatagcctgctacgtattgagtttctgatagaaaatacctatcagctaactttttattttaatggaagtcgagtggtttgtcaatgttcttactctagtactcttaaactcacctatcctagcgactatattttccttttcgaaaaataccagggtttaactggcactgcttatggacagaataagcttaatctctcttgtaaaccttctaagacttctttcggtacttccctgaccttgatatccttacctaggaaaagcagccaatttgttatttcggtcaattcttcgggattactgacattaatataagtctctagaatggctgtggtttgataaggattcgtataggaaattgacatttttaaaggatgatattttttgaattgggcaatcgcctttggaccaagttcaagaacaaggttgattacttcttcctgcttacttagtttctctaaaatctttttcttgcttattctttttttcgcagagtatggtttgacattggtgagattgtccgcagggaaaatcctcctcttctcatcctttacatcaaagccttcaatcagccaaatgcctttttcatgataaaggtgcaagaggcagattggataagactttattaccttctcttctttgatggtaatccataaatagctatccgaaagaaggagctggatgagtttttctaacatgggatgggggagatctgaaagctcaagcaggtcggggttatgggggtttgtcccttcaaaaagcaagatttgatttaaaagaaccagggtctcttgctggctttctgagataaggcccagtaatttttcagctaaagattgacggctctttagataagggagctgctgatttcttgtggccataaacgctataaaaagagctttaatctcattatcggtaaagcgaacagcgggcaggacagagtggttcatgacaaaataaccgccgctccttccaacttcagcaacaagcggcatccccatggcttcaatttctctgatatctctaatagctgtcgaacgagagatattaaattcccgcatgatttcagatattgtaaagtgggcgcggttgttgatataccgcatgataatattaatccgttcaacttttttcatcgggacctcctaaacagtatcattttttgacatggtttaaggttattataaacgcatcaattgaaaagaaaaatcatttgattattttaaaaagaggaaggttttgaatatggaaaattatactctggaagaaaaagacggatttaccgtttttggtattggaactgagcttaagagcgattacacagactatgccggcataaacaaggaaaaggctgacttttgggaagccgtcaaacaagatggaaggcttgacaccttgaaagccattgccgcaaatgactatatttttgccgtgaacgaagcggtaaacaacaggttgatgcattatgctggcgtgatgacagaggaagaggcgtcagtgaccggagaaaccagagtcatccaatttcctaagggggaatacctggttgtgaaaggggaagggaagacggccgatgaattgagcaataagcttaccggcattgcctttggtcaggtattgccggaagcaaagaattttgcctatgtcggcgggccgaatgcaacggttgagatggggcagcgaaacggcttagtatttggtgaaatgtggattcctgttgtcaggaaataaagagataaaaggagagatggaattgtcctatatcgttgattttaaaaatgtgtctgctgttggtttagagtcttcacctgtggcagaagcgcttgctggtttacgtgctaatgaagcccgttacttaatgaacaaatacaagcatgaatttacggtggcaccagctagcgagtcctgcgagacccttgagtatgtaaaccgaattttgaaagaagaacgtgatattgagtttgcggccaaacctttagaaacgtcgcgtttccaagtggaaaatatcaaaatggcctacgtcttttatgaggatggccttgaggtcaacgtcatgtatacggttgatgaccctaagaagcgtgctgttggttttaagctttctgaggggatggaagtgccaaaggagttagaaggaaagtttaagtttgccaggcaaaagtctaaattagccggaacaattcggggctcgttttttgtcattaaaggagaatattaaagtaagcataaacaactattcatgcatcgaatgttcatctggcattcaaattacaaaacagcacctctccatcaaattgaaggtgctgttatttttttcgcttaaacttgccgctgaaattatcagcttcggcaccgcgaaattccgcggtctctccagaatctgcttcaaagcaatcatagcctgcgacaatgccgccatttcaaggcccttgaaaactatctgtttcattcatctcatctcggcgcctcttgccctcgttttgattgtctcaaaaaggcgttatgcggtactatcatataaggtctaatgatttaatcataatgtcatacttttaaattcaccttatcatgtaaatgctcgtaaataaaaaggggatggacgagattggaaacgaaatatttagatctgctcgcacaaaaatacgattgtgaagaaaaagtggtcacagaaatcataaatctgaaagcgatactgaacctgccgaaaggaaccgagcatttcgtcagtgatttgcacggggagtatcaggcattccagcacgtgctgcggaatggttcaggaagagtaaaagagaagatccgcgatattttcagcggtgtcatttacgatagagaaattgatgaactggcagctttggtctattatccggaagacaaactcaaattaatcaaacatgactttgatacaaaagaagcattaaacgattggtatgaagaaacgattcatcgaatgattaagctcgtttcttattgctcttccaaatacacccgctccaaattgcgcaaggcgctgcctgcccaatttgcttatatttctgaagagctgctgtacaaaacagaacaagccgccaacaaggaacaatattactccgaaatcatagaacagatcattgcgctcggccaagccgataagctgatcaccggtcttgcatacagcacacagcgattggtggtcgaccatctgcatgttgtcggcgatatttacgaccgcggaccccagcctgataaaattatggaagaactgatcaactatcattcagtggatattcaatgggggaatcatgatgttctctggataggcgcctattccggctcgaaggtatgtctggccaatattatccgcatctgcgcccgctatgacaacctggatattattgaagacgtctacggcatcaacctgagaccgctcttgaacctggccgaaaaatattatgatgataacccgtctttccgcccgaaagcggacgaaaacagaccggaagatgaaattaagcaaatcacaaaaattcatcaggcgatcgcgatgatccaattcaagcttgagagcccgattatcaagagacggccgaactttaatatggaggaacggctgttactggaaaagattgattatgaccgaaatgaaatcacgctgaacggaaaaacatatcaactggaaaacacctgctttgcgacggttaatccaaaacagccggatgagctattagaggaagaagcggaagtcatggacaagctgctgttctctgttcagcattccgaaaagctgggccgccatatgaactttatgatgaaaaaaggcagcctttacttaaaatataacggcaacctattgattcacggctgtattcctgtcgacgaaaacggcagcatggagacgatgatgattgaggataaagcctatgcgggccgtgagctgctcgatgtatttgaacggttcttacggaatgccttcgcccacccggaagaaaccgatgatctggcgacagacatggtctggtatttatggacaggcgagtactcctccctcttcggaaaacgcgccatgacgacctttgagcggtatttcattaaagagaaggaaacgcataaagaaaagaaaaacccgtattactatttgcgcgaagacgaggcaacctgccgaaacatcctgaaagagttcggtctcaacccggatcacggccatatcatcaacggccatacaccggtaaaagaaatcgaaggcgaagatccgatcaaagcaaacggaaaaatgatcgtcatcgacggaggcttctctaaagcctaccaatccacaacaggcatcgccggctacacgctcttatacaactcttacggcatgcagctcgtcgcccataaacactttaactcaaaggccgaagtgctgagcaccggaaccgacgtcttaacagtgaaacgcttagtcgacaaagagctggagcggaagaaagtaaaagaaacgaatgttggcgaggaactgctgaaggaagtggctattttggagaaactgcgggagtatcggtatatgaagtgagaaattttcagggttcagaggtgattctctgggctcttttttacggttttccgtaacagtcatactgagacccttccactttatttaaaaccgatttaaccgcttcttcaatctccttataacccgtacatctgcaaatattggactccagccaattttttatcgtttcatcacttgcatttggctcagtattcactaaagcatgacaattcattaaaaaacccggcgtacaataaccgcattgaaacgcaaatttctcaacaaaggccttttgaatcggcgtattgatgagtccttcaattgtcgtaatttcccttccttcaccttctgccgcaagcgttaaacaagatttcatcggtatcccatccattaataccgtacaggcgccgcaatcaccatttaagcagcccggctttgaaccagttaatccaagacgaagacgaagggcatataacaaagtatcggccggtctgacagtaatctgtctttcctggccatttactttcaatgtaataggatcagacatgtggacctccttctaattcatatagggcatctaagattgtatgctgtaaaacaaatattcgatagtcacttgagccttctgcgtcatcaagaataggtttcggcagatactgtaaagacctgcgcactctatcttctaatgagcagcttttatcgttaaacatagcctccatttcaacagaacgaaaaggaaatggacatacgccgctaaaggccattctaatcttttcatcttttttcagtgcacaaactgtcaccaatggatatccgacattccactgctgtcttctttttatactgacaaatggcaagtctgtatacgtccggtctataacgatatgaaataaaaaatctcctttttgcagttgtatttccctgttaaatattttatttataggatggtaatgaagccccgctccccctgcaatccccatcaaactatcagaaatcagcaacggcagcacggcctcacggtaatagatgcccccgcaaatatttccgcccaggctgattttatttcgagtcgtccgatccgcaatttcactcactgttttacttaataacgggaatggattttcttcctccactttcgttaatgacacacccgctccgattaccagatcattttcataaaaaccaatggtatgaaatcccggaagtgcgttaatatctatcaccgcatccgtatagatgagattcagccttcctaacgttataatttctgtaccgccggaataatacattggcgttttcttttcggccgcaagagagtgaaatagattggttgtttcttgaatggtcttcggtttaaaatagtcaaaatcaaacggtatcatctttccaccccatttgcgtcctccataattgttcgggaatgagagggagctgattcaattggattcctaatgcggcagaaaggcaatttcctaatgcggccggcatccccaacagtccatgttcccctgcgccgcgtgctccataaggcgcaataacatgcggggtttcaacaaattcaatgatatattcaggctgctctccatagtgaaggggtctgtatgttctaagttgaggatttaatactcttccatatggatcaaaaacaaaggtttctcttcctccaaatgcgattcccatactcatcccccccatcacttgacccaatgcagctttttcattcaatacagttcctatatccacaacagaataagcttttgtaattcgatacgtataatcccgtttatccagctcaacttcaattccctgagcacctacagcccactcgggtcccggctttctttttcctgtttccgggtctaaattcgtcatccgggttaatgtgtagctgccgctcgccataatttgcccgccaatggtatttccatttggaaacgtatatccgtaagcgatgtcttttatttcaacatacacattcggattatctaaaaaataaacctttccatcagccacttctaattcctcgacaggaactcttaaaacacatgatgccacgtccttaagctttcgaatggcttcctccgctgcattcagtacggctcttcctcccattaaagtccctctgctgcctacggttttccaatgctcaggtgttgtttgagtatctataagcatttttacgtgaattttacttatatccattttcattcgttccgctaagatttgggctaacactgtttttgtccctgttccaatttcaactacccctgacatcaaattaatgcttccgtcaggattaaaggttaaaataacccctgaagttgcatttgtatcaaatgttgacgttttccaaatacagctgatcccctttgcccgtatcttccgatcaccgatttcaattctctgtccctcatcccaattcattaattccttcaatctttcaatacattttggtacatttccgaccgtgcttgaattgagaagaacttgagtaggggtcgtgtcaccgggacgaatggcatttttatagcggagttccaacgggtccatattcagcttttccgccaatacatccatcgtccgctcaaaggcaaataaaacttcagcatgactgtagcctctatatgcactgggatatggatgattcgtatacatacaatatgaatcacaccatacatggtcgattgcgtatggacccgtacaatcaaccactgcggctcgactgacgtcaactcctttatcagagtatgctccgctatcaaataaaaactgaatgtctgccgcctttaagattccatcctttgttgcgcctaattttacaatggcatccaatcctatatgagcaggagacgtgatcatatcctcttctctcgaattaaataattttacggcccggcctccagctgcttttgatgccaaataggcaataacctctaactgaaccgctgattttcccccgtatgcccctcctactaaaggtgttttgacgataacctttccgggttctattccaaaataccactgcattaattttttaatggcaaaaggagcttgagaggatgttgtaatggtaatgtccccatccgcttgaatttcagcaatcgagcatcttgtttccatagcagcgtgatcagagggattaaaggaaatgttgaactctgctgtcacatcactttccctgaacccgacttcaatatttccttttctgactttatccaggtttgcgatattcgtcttcggaacgggataaacaccttccttcttctcataacggtccaaatgttcatggacgaggggagcatccttttggaaggcctccctgggagaatttacgacgggaagaggctgataggacaccttgatggcatgcactgcctttttagctatgatcggattttccgcaacaacaacagcaaccggctcaccgtggtatctgacttttttataagcaatcggcgacctgtctttaatttcttcaccgacaagcggaaaaggttcatcacccaatatcgctatcactccgggaatcttccaagcttctgaaaagtcaatagaagcaatatcggcatgagcatatggactgatcagcattttcgcgtgcagtgcacctgtttcttgaaaatcatctgtatatttcgccttacctgtcactttttcaagggcttcttttcgaataacacttttcccgatataccccaactcattcactccccgaatttattcagcagcagagtataatcttcaattgtatctacgtcataaaaaagcaaagggtcttgaaagctgatcatttttcccgtattacttttacggattacataccgagcgccttggtctccctttaactgatgcaatagcggaaaacattttctggagaataggatagggggcataggaagatgttgattttcagcagcaataaatgaatagcggtgctccttttgataggaatcaattaacgtattgatgatatctgtggtgacaaatggctggtctgcaaggagaatgataacggcgtcagcctcatactctaacgctctttttaacccacattgtatggagtagccttggcctttatccgcttgttcacattctacttggctccacttatttaccataggatataaaaagaaaaaagccgagagccaatgcagtgaatctccctttctggtgataatgaaaatatgatctaatttagataacaaggcatttttaagcgccatacttcccagagaaactccattgagaaataaacttcgcttatccgtccccatacgtctgcttgtaccggctgccaggtaaatggctgctgttttcataaaacagacccttgttttcgcatttttttgatcatctcgccaacaatacttacagcaatttcctcagggccttgtgcgccaatggaaagtccgataggggaatgaatatcctcaggaatctcagccccgcccaataggcgtttcgtgcgccttctggggcccaatacacctttataaaacacatcttcattttcgaatttatgtaaaatggtccgatctttttgaaagctgtgtgtcattatgataataaaatccctgtgtgtaatgctcaggccctccattacttcttccagtactccgacaatcaaatggccggcttcaggaaaatggccgttatgacataaagcaggacgccagtcaatcaccgtcacatgaaagcccgtaccagccgacaaagaaaccaatggcttagcatcttcgcccgctccaaaaacatataaacaaggttttggaatcatctgatggataaaaaataaatcagatgtatgttcatcctttttgattcccttttccgtatcataaagggggtttttcagtttttgaacttgctccataaaatctccggttccaaacacgctgccgtcttcagctatatacatatcttcctttggctctaacgtttcagtgaatcgtttcactcgggtcacagacttttttccatctaagcatttcttgactgtcagcagatgtctttccaattcccctttgacaggctcaagtaaaaccgtcaaaacaccattacagccaacgccctgtccccaggataaatcgtcctcagcactcatatcaaagtgaacaatcactggctctcctgcagcccaaacctgctctgttctttcagcaagatcgtcttccagacagccggcggataacattccgactcttgttttgtcccctaacattaacatggaggccccttctttcttataagcggacccctctgttttaatgatggtagccagtaccttaggttttgcagaattcgcgatgacatccaaaatccggtgtatatcatccattttgatttcccccgcttttacctgatcatatctgcatctgtataaccatattctttttttccagaaaacattacaaacgtttcagcaatttcttcgtttctaaaaaaaaagagtctttatagaccttatgatcgggcggcgggtacaacagcattttggaacggagagattccaataacatgttctgttccttctgtttccaattgtctgtttcaccctgctgtattcctttaaaaccctcaaaaaattcacttaacacttttaaatcattgcccagctccattttgtcacatgaagataaaaggccttctttttcccattcttttaacgttttcactatatttgatatatactcataccctgcattcatcttttgtatctctatttgatatcttgaaagaatgattttatgctttttacggattggattgaattttaaactgtcagaggctgtttgcagcatctcttttgccgtatgcagctcctgcagaagattgttcattttatactccacaaggttcccctttccttgtccccactctgattgaacccatttggaaaggtctgaaagtgtgtcagaaagctgacgagccaatgatcgaaatgactccgctgccttttttgtaaagtccggcggaaaaaggaacatatgaaccagaatggcgatgatgacgccgatcaccgtatcgatgattcgatccattgcataatctttggagtgtcgttcaaacgtaaataccaataaaatggtgagggctacctgatgtaaaaccgtttcatctattcgtaaccaccttgcaatataggtcccgcctaatagtaacagccccagcatccagccattcattggcaagtgactgacaagataggatgttaacaagatcccaattgcagttcccgcaatacgatgaaaagaaaatcgaatcgactgatctatcgttggctgcaaacataaaataacagatagaggtgctaaataggggtgatgagagcccgccagttttgccgcttcccaagaaacagcagatgcaagcgccatcttccaaaccaacgatgtgttgttttgattttttttacttttcttcataagccccctcctttcagaaaccttttccactaggtttccgttacgcaaagggatttatactgatatatggaaaaagcgaaagaagggagaacgttagcaaatgatacattatttactactctttgcaggtgcttcacctttcttgatagctttgccccagatatgaagaccgcccccctatgactttcgaagggaaacacacaaaccttgttggttaagcgcaatggaattgggtgaattttttatcattttatatggtaagggtttaagaagcagaatgcctttgttagtatggcaaccaaaggaggaggatcaattatgcaaagcagaataaagctaaccgcagtgaaactggcagccttggtattcctagtaggtgcctttgccctcccggttttacctcatgctgcggctgccgcagaatcccaagctacatacaaagttgaaaacctcaacgacagtgagctgaagatgacgttcaatcatgcagatgttcatattgacgctaaaggcaatgcaaccctaaaagacaacataacgggcgaggagcaggctcttccgaaaagctctactgacaaaaatggtgaccccgttacactgaaatacgaaaaaatcaaaaatggcgttttagtcaaagtagtaaacaaagactctggaaaaacgagcggggcaatcagcacccaatcagtcgggaaatgtattttaggtactggcggcggtgcggtaactggcggaggcacactgggtcttgcaggagctgctgtaggaaccgtcacaatacccggcatcggaacagtaggagcgggtgccgttggagcaattaccggcgctgttggcggcgcaatgacaggagctgccgcatcttgcttttaatcatgaagaaaaaggggcccgcgcccctttctttcactaactatggaaggtggtcaacatgtacaaaatcatcattccttcaatactaaccatcttcattctctggatactcttacagatttccctggagataagcatcgttaagaatccattgaattattttattgtattcattgtcttctttctctttataaagatggtgaaagagaagcaacagtagtttgcaactaataagctggaaaccagatttgtgttggaatctggtttttttgtgtttttattcactatatataaatcctttgctgaaagacaacaacagaatcaacagaaaactaaactctaacggctattttgtcaaatcggtctgctaaatgttattagcaaaattttcattaaaccctatatcaaattacttgatactatagttaatttcgctcgatctttcactcacaatttctgcaattcttttgcttcaatttcaacactaaatcccgttctctttaacttaaaaatcaaatcctcagaaaaatcttttaccttatacttatcaataaaaatagttaaattgctttttgctcttgagcaaccaacataaaaaagtctgtacgcagacagaactccgtacacagtactctctttaaaacattttttaaagtttgtaacattaggttttagaagatatgcattgtaaaagtcttcacaaagatctttaaatatccaattattctcgaaatatttgcataattcttcaactcttgtttttagataagttgcatgtgcctcatacttttctttattcaaatctgatattttacatgctaaatggtcaattgtatcttcaatccactttttataatcataataaaaggattctagagaatctaacgatagttctgtaatagtccatagttttaagaatttatacatatgaaccagcggtgttctaaaggaatcgtccgcaatgaagaaaacagtattatgactctctccttttacaccatgttgtgtcgaaactttcgggtctttcaaatagtttgacagtgccttgaattcgtttaatgtaactgctaacactccaatatattcattagatatattatctatatattcctcttttataactctagagcctcttaataaagttaaaaattcatatattgagctgtctttctgataaaaatcatatatttgttttaatagattgtttaagttaactttatcctgatgactagtaattgtaccaattctagtatcaaatattttttgattccttttaagggtttgaattatactgccaagattaaaatcctcataataacttagaattttatctactataaaaagcaactttaaaagaggatctttattttcatttgtattatcagataagacatcactagcatttagttggtttacttgtgaatatctatccaatctattaaattgtctgtaaaattctccagcgcctatcgaatcaaacctttgttgatttaataaaaataacaataaagcattcggataaattaattgttccctttttattcttttttgaatgttatcacacaatactactcttggtggatggtctggtttattagctcggtttttatcggatgagatttgtttgaattccttatcattatatatattatttaatatagaaacgatatctggtattgaccgatgattagtatctaatttaatttcattatttagagtttttaattctttttcaaatgacccatcatagtttttatatatttgttgcattttgtcgccaagaaaatagagttttgagctagtatttagtcctgctttataaaacattttaatacactgggagcagagtcttggtactcatctataaaaatcaattgatacttttgagttaatctcttcttgattttaggaaacttttcgaataccttttctgcaaatatgagcaaactatcgtgagacaaacctcctttgtaaagatgattgtttgaagtttcattataataaatagaacttatattagtttttatcacttctaaggttaaacaaccaaacttatcgatatacttcttgtttctagctagtacatgttctttctcttccttgttctcaatattccctctgattaaatccccaaataactccatatataaatctatcatttaatttttacaaaaatagattcttaaaaatttatgtaaaaatgaatgaattgtgcttatgtgaatcccttcttcatccagtccctttttaagctcttctgcagctctctttgtgtaagtaatacaaagtatattatcaagtggatgttttatcttatggtttacaatcattgattttattttagttgttttgccactacctgctggagcattaatgagaaaaatattatcaactaattttgcagccaatctaatccctccttaatataattaggaagcatcttttctattagaccatttaaaataactgagtacataaaatcagttttattattctctgaatgtctaacaatatctctaatactgtatttttcatctttatctaaatcatcttttttagatttatcagggtttggaatagtatatttaagattatcgctatttcttttctcaatccagaaacttctatcttttttttctaacacattcaaattataaaattttgagagcatagcttcttctaaagtccgagcatattgttcagattttccttgataattaattaggactaatcctccaagaatcttattctcacctttgtctttccattcatacaaatcaagtattgttggagactttatttcttttgataaatcataataggtgttgattgttgcatttgttgttttagactcttttactgcttctacagttgttgcatcttttttataatctagatcagttaaaacaagagtttttatcttcagaaaatttatcaccttactatatttatgtgcgtatgctccgccaacttgaacataggctatgtatttttggttaagttcttcatatatatctagagtcaataactttcttataagcaacctttctgtgtcaccctcatatagaattactctatctgcaaaaactatttcagaaaatcctatttcataaaaccaatcataaaatgtatccaaagtggtgtcaccactcaagccttttttaaacatagaaaaatcgtaaattttactttctaactgatctattggtcgtgaaactcttaaatttttcatttccgttaggcgcaccatttctccggaatgagtagttattaacccctgtatttttttttgaagatagtaatcttttaaatacttcccaaagattcgttgcatttgggggtgcatatgtgattcaggctcttctaccacaaataggttgactaatagcggatcaatttttcttttatatgtttccaactgtagcagtatataaatcatattactgtaacctaatccttgggaggcttcattgaggaaataaccttcatattgatatttagtgttagttatttgattaagaagagaggttattgtgccttcgttaatatctatatcaaggatcatactccctgtattgcctccacttgctttagcaattgttttaaccgcattgctaagacctttcaccgatgtgtctcttaccttatcaataatctccgtatcttgtattggacttagtatttggtctggtaagttctctaatagggcacctagtttttcatcatgagttgcgagctcaaccatatttttacttaaacttttaaagttaccattactctgatcatcgagtggtctacctgcattaatatatctaaaattaaacagtcttcgaaaagttgaaatgtcaatttcgactttatcagtataatcgctatcactaaagtaacatttctcaattatactcgcttcataaattgacaatattacctctttaaattgtcgtatttttaatgttggatcttttgaggaatgaatttttttatatcttgcatataattttttataattttcctccaatgcttgtccaaaggatacataagtaggttgaaatgaatattcaaaatagaagcttttattatccggattcaaatccataataaaatcggcaaactttctaatatcgtcctcttcactataatctattctaaaacgtatagatgttgcaggtattattagatcacattctaaattaaacaattcagtactaaatagcttgtttataattctctctactgtagataattgatcatcgccttccttaaagcacagtataaaggtctcataaacttcatctacccattgttttgatagccttactggtatatccgaaataaaaaatggcgttttgccattttgcattatagatccaattaaattaatcatagaagtcttaccactattattagcacctgcaagcaaggtaacgtcgtcagccattgaaaatgcttcgtttttaaacttcctataattttgtatagtaacaccttttaaaagcaatttaagaacccccagatgaatttccgattttataaaaccccactcacttatgataaggctccccacgattaatccgaaacgcccgataaatctgctcaactagtatgagacgcatcaactgatgaggaaacgtcatcttcgaaaatgacagcttgtcgtctgcccttttcatgacggcgtcgcttaggccgagtgagccgccgatgacgaaggtgattttgctttttccataagtcgccagcttatctattgtatcggccagttcttcggatgttttcatctttccttcgatggcgagggcgatgacgtgggtgtccgggctgattttggccaggatgcgttcgccttctttgtctttgacgattttcatatcttggtcgctcaggttttccggggctttttcgtccgggagttcgatgatgtcgattttcgcgtaggctgagagtcgttttttgtattcttcaatgccttgcttgaggtatttttcttttagttttccgattgtcacaatattgatattcacaggtcatccccactttagaaacaagttattcatatatattgtccacaattgtggatatcttttctgtattttgtgtaggatcattcgttccctactagatatgttgcggtgtccccacataattcacaggctgtggataaactgttagtatgttcgatttttctgatttcgggcggaagctcatgatcatctatgtacatgtccagcacggtttcgatatgttcttcacaagaataataagcggttttcattgttacatcctccggttttcttttgcacacggcaattgttctcttctcaatataacctatttatacacatgttagtagtgcttcgggctgagttttatccacaattcggcaaattccgcgcaaaaagagccggcgtttgcagcatccggctctttacgtgttttctcttttttctatgcgaagtacgaacagaattcctaatatacacgccagcagtgcagagcatacattaatccagtccggctttccgccggttaaaaaatagttggttattacggaaaccaggagaatggttacggtcaccgcggcaagctttttcttcatcggctccctccttcacctgactgtcttctgcttttacgggtaaaattcctctatctctatgttcggtcggctttttttcttgctatttagtcttattatgagggtcacaacgatatatacaatcataatcaatgtcccgttactcacatcaggatatccaatcaacatattcatcatcacaaaaacaattgttatacatatgacggacaacaataagaagatactgaatgatttcaaattaaacaccttctttcttgcagtagcgtttcattaaaaaaaagcttaccaaaagcggcaagctcttaccaaatgttcgtacttcaaaacccatccatcacctgcacgtcatacagcttgagatggcttttcggcgtgacgatgtttttcaggtttgggatggtccggtcgttcagctttttgcccgttttcagatcgaaggattcgattttggcgggttttttgtagctgtacgtgaagagatacagctttccgttttgatgggtcaggtctttgaaatcagccttcattcctgatgcagggagggtgaaggcttttttgctttttccggtttcagggttgatgcggtatacggttccgaagccgtcaacgaaatagaggctgcgctgctccataaaaaagctgtttttgaagctgaacggcatggagtcatagagggtctgttcgtcatttttataagaggcgatgtcatacgttttgatagcgccgctgtttctcatgactttcaccatttgatagatgtggtcggctttttctcctcttgtgagaaagtagacggcgctgtcatcagcggcgagctgggattcgacagacgtgccttctttatacgtccatgtcgcgattgtatttgtatggagcctctctttatcggcctgaatgtcttgaacgtgatagcctttttcgtcatctgtcggcgtgagtgcgaaaagatgatctttaaaaaagcctgaggcgcggatatagtgcgggatgacgtcttgcttccacttgccgtcaatctggcggtacagctctgagcgatagctgccgccgcttttgtcgtagcctgagttatacagcgtgtagaagccttccgtccggtcaatatatcccgcgctgtcccccgtatgctggtacgctcttttatacgtgtgaaggccgtcctgaacagtgtaaatcccttttttgtcctccagcaggacgctttcgtcatgcactttggccgatccgagttctagccctttcatttgataagaaaagagccggccttttttatcagcaaatagagcatagctttttccgccgccgaacgtgtcctggtcagccgtagtggagaaatacagcagcgcctctttatctttcagaaaatcaggatcatttaatgtttccctctcaacctccgcaggctcttccgtgcgaaaatggaagaagcataagaccgctgcagcgatgatgatcactaagggtatccagatgatttttttcacgtttttctccttagttaatggtgagaatcgttgtcgtataaggtgagcttgtgatgtcgcgcggatatacgcccaggccgccgttagagtcaatgtcgattccggcttttaggaggaacgctgaccacagcagtttcgagcagtttttggcgccttcatggcctgtatttcggttattgacgaagttgaaggagtactcgtcgccgactcgtgatacggcccagtcagcagcggcttgtttttgggcatcggtgactttcacggtttgtacgattgaattatcctcgacttctcttccgttataggcgatttggcggacgccgtctcccggtacggattcgacgatcttatcagcggcagaatacatgccgacatggccgtggttgtaataggccgtgtatgagttcgtgtaataaatattgccttttgtgcttttcggaagttttttggtgcctgacgatccgcccatcgcagatagcccttctttggaagcgtttacatctccttgcaccttgtctgccgtaatttcttgatgaaactgcttgagaatcgcttctgttgacacgtgcttctgtttggcgagctctttggctgattggagaacgtcttgaggggtcgtgccctgctgaagctctgcgatttcttttgcatagcgggatgtttctgtttctttcgcttttacattcataccggagaaggacagaaccatggtgaatgacagggcaaacgggaggacggctttgaacagctttttacacatcattacttcgcctcttttcttagagtataatttttccacatatgcattatatgacagaattgtgataaaaaaatagacaatttacagatttttaaaattttataacaataaggaaaagatatgcataaaaccaccttgaaatatcaggaaatctggttatcatatacacaagataggaaagggggagaaatatgaaatacagaacaatcggttcgatgcgggtttcctcattggggttagggtgcatgggcatgtcggaatactacggcagccagagtgaggaagagtccatttccacactgcatcatgccgttcatctcggggtgaatttgtttgatacggctgatcaatatggattgggcgcgaatgaagagcttgtcggcagagcgcttgccccgtacagaaaggagctttacctcgcaactaaattcggctatgtccgaagtgaaaagggcgagtttattgaaatcaacggccggcccgattatgtcaaaaaagcgtgtgacgccagtctgaaacgcctcgggacggattatatcgacctttattatctgcaccgggttgatccgcgggtgccgattgaagagactgtcggcgctatgaaggagctagttgaagaaggaaaggtgaggtatatcggcctgtcagaggcttccccagaaacgatcaggcgcgccggccgcatccatccgattgccgcgcttcaatcagagtattctttatggagcagggaagcggaggagcatgtgctgcccgcctgccgcgagctcggcatctcatttgtgccttacagtccgctcggcagaggttttctgaccggaaagatgacgtcgacagatcagcttgatgccgacgattacagaagaagaacaccgagatttcagggagacaatttggcggtgaatataagactcgtccaaaaactgaccgacattgcccgggaaatgaatatgaccgcgcctcagcttgcgctcgcatgggttctcgcaaacggtgatgatctcatcccgattccgggtacaaaaaagaaacattacttggaagagaaccttgccgctcttgacattacgcttcccgaagaagtgaaggcgcagttggatgagatgtttccgatcggcacggcggccggcgagcgttatccgcatcatatgatgacattgttagatgaataacaaaagaggcccatcgtgcgggcctcttttcatgacagctttttgctcatgattacatccgtctccaggaatcccgtcttctcatacagcttccgcgccgtttcgttatgagcgaacacatggagagaaagcttgcggacacccaggtcttttgccttgtcctccagccttgcgatcgcctcttttgcatagcctttgccgcgataaggaggatgaaggccgaaatcataaataaatgcgtcctgctgcgggttgtccggatcggcgtgcagccacagccagccggcattgtcctttccgtccaatgtcagcgtccataaatagtggtcagccgtctccaagccgtcaggaagcagatctttaaatgtccattctgctagttccggcgcttcttcaggcagccacgttcccgcttttatcttttcttcagcgtaatgctttgttgaatgggcgagataggattgaaattcttgctctgtcatcggctgcagtgtgatagccattgaatcactccttacaaaacacagactgaaagcggtatcatgcagtattatccgaaggctccgttttctgcgggttttatgatttgttcggcttgcgccgttgaaccagtttgtgcaaataatccaatcgaaatgagacttgccaaggctgctgagagtacaatgaatttacatgttttcattacgaatcccctccgtcaatctcaaaatttggtcattagcatctattgattcttggaaatacttcgccgccagtttgtaattctcctgttttttaaaatgcgcagcggcctgatacgataaatcggaaacgtcactccacagttctttcttttttaactcggcgaacgctgattcaagcgcttcttcactgtgatcaataaagacatgctgtaagatgcgcagtttttgggtgtacacaggttcatttttttcgtctgcggcgttcagcgctttatgaagccaaaaccggccctcatccgcctgctcctgcttcaataacactctggccagcatgtacagactccgcaccgaatatgcggattgcaaatgctcctttttatcgagagccgtttcaaactcgactcgcgcctcctccaatttctcctgtctctcataacaaatgcccgcgttaaaatgggccagcgcctcaatgtgcggatcgcctgctttggcggcttgatgaattgccgtctgcaggagctcttcggctttctgatagtgaaacaagtccattctgttacagccgatcaccattaaacactgtgcttctctgaccgcgtacatttcgttggctttgtagatctctaacgctctttccgcatgattcatcgcaaagtagttttggcggatttcatagtaggcaatcgccacttggtaattaaactcggctctttcaatctcattcggtatgtgccggagcctgctttcagcgatccggtaaaaattaatggcgttcatgaatcgtttccggtaaaactcgtgcattccggaaaagaaataataatagtattgaatcatctggtctgttttttctttatcggcgttcagctgaatcgtttttaaaatgccgtctgttttctcatactcttccatcaaaagcttatagcgggaatcaattaaattaaaataaaggagcaccgtttgattttgtgtcatattttgcagatctgtaagcagctgttctcttaacgccttagccgattcggttttgtgctttttgatttcctcgtaccagtcactgatttttttcgcaacagtttcgtgggccatcacctcagccatctgtcaggacacctccctttcccattttgtgtaataaatatatcatatttacaggctcaaaaagagggtgacagcctgctagtttcctagtggcaacaaaaaaacccccgcaggtgcggaggcgcatattttataatagtttttttcctaacaaggactccaccagctcaaccgctgttttgccggttttgtttttgtgatcgaggatcggattgacttcaacaaattcagctgaggtgataatgtcggcatcatacagcatttccattgccaaatggctttcacggtagctgatgccgccgacgacaggcgtccctacgccgggcgcgtcactcggatcaaggccgtcgagatcaaggctgagatgaacgccgtcacagcctgacaggtagtcaatggtttcttccatgaccctcgtcatgccgaggcggtcaatctcatgcatcgtatataccttcatgcctgtttccttaatgtattcacgctcgccttcatcaagcgatctcgcgccgatgatgacgacgttctccggcttgattttcggggcatagccgcccagattcaccaatgtgtcgtggccgacgccgaggctgacggccagcggcattccgtgaatattgcctgacggcgatgtttccagcgtgtttaagtcgccgtgcgcgtcgtaccagataacaccgagctgtttatagtgcttggccgttcctgtcagcgttccgatcgcgatgctgtgatcgccgcccaggacgagagggaaccgctcactctcaatgacgctgtccaccttttgggcgagctgctcgttacctgagagcacagagttcagatttttcagctcttcatcttttttgagtttttcacgattgacggggatgtcgcccaggtcttccaccgcataccccatgtcagataaccgttcaatgagatgcgcgtagcggatggcgctcgggcccatatccactccgcgtcgtgcttgtcctaaatccatcggcattccaataactgagatattcttattcatccgtttttccacctcaacatgttgtatgttgtcctgtgcgggtttctcaaagatgacttggacacgaaaagattttaaagctctatctgtttttctgactgtttatgcttttttacatacagatgatagacgataacgcacactaccatgaacgggatgccgcaataaagggcgagccgctgttctgaatcaaatgcgagactgatcagaacaaccgtattcaacgtcagcccgataataggcagcaccgggtacagcggtgttttaaacttaaggtcttccacttttccgccttcacggatgtatttccgtctgaacatcaactgcgacagagaaatcgcaatccagccgacctgcgcgcttaatccggccaatgataagagaaacatataaacggctgccggcgctgcgactttagacagcagcgacaggcaggcgacggccagcgtcacgatcagcgcattcatcggcacgccgcgtttgtttgttctgccgagcgctttaaaggcttgcccttcgttcgccatggcatataggatacgcgttgatgcaaacaggcctgagttggccactgacagcagcgcaattaaaataacaaagttcatgatatcagcggcatacgggataccgatttgttcgaacaccacgacaaacgggctttcgaccactcccgcctgcttccacggaatcatgccggcaatgacaatgatggaaagaacgaaaaagacaagcgttctccataccgtctgccggatagagcgcggaatcgttttctcgggattttcactttctcccgcggcaaccccgatcagctccgttccctggaacgcgaagttgacggtaatcatcgtaacaagcatagctctaatgccgttcggaaacaatccatcctcataaaaatgagagaagaaaggagccggctcgccgtgcttcatatcaatcaggccgaacatggcggcgccgcccaaaataataaacagcagaatgactaaaattttaatgccggaaaaccaaaattccgattcagcgaacgcttttgtcgtaatggcgttcaaaagaaacatcagcccgacaaacacgaggcaccacacccacacgggaacatgcggaaaccagcggagcatcaattggcccgcagataaaaattcaatggcgcatgtcaccgcccagccgagccagtacagccagccgaatgcgaaaccgaaagcggggctgataaatttggttgcgtacgtctgaaacgaccccgatacgggaagggcaaccgcaagctcgcctaagcagagcattgtcaaaaacataataaaaccgccgaccagataagacagaaccgcacccagcggtcccgcctggttgattgtaaatccggtactcaggaaaaacccggtgccgatcactccgcccaatgaaatcataaacaaatggcgcgatttcatcgtgcgctgaagctgattctctttttgatttgtattcactgttctgcaccccttcagcaacttgtattggaaccaagccggtgcattgaaaccgatttgctgtccaaagagcctctatttgtatatggatgttatataaaattcattttcgtacataaagatacattatactaaaataccgtcgccgcgcaaatagagtgtgatgaatttttatttgtaaattccatacaagccgagggaaagcattgccgcatcaaagttttacgcgttttgaagcacatttgtgatcttttggatcgcccagtccaagtcttccttggaaatcattaacggcggtgcaaaccggatcacggtatcatgtgtttctttgcataaaagcccttcgcctttcagcttttcacagtatgggcgggccgcttcggtcagttcaacgccgataaacaggccgcgtccgcgcacgtcttttatgatagggttatcgattttctcaagctcttctttaaaataccggccaagctgaagcgaacgctctgccagcccttcttcctcaaggacttcaagagatgcgatcgataccgcgcaagcgagcgggtttccgccgaatgtcgagccgtgggaacccggattaaacacgccgagaatgtcacggttcgccgcgatgcatgaaatcgggaagacgccgccgccgagcgcttttcctaagatgaacatatccggtacgatattctcccagtcaatcgcgaatgttttccctgtgcggccgagtcccgtctgtatttcatcagcgatcagaagcacattttcttccttacaaatggcggccgcttcttgtaaaaatccttccggcggaatgacgatgcccgcttctccctgaatcggttcgaataagaaagcggctgtgttcggcgtaatcgcccggcgcagcgcttctgcatctccgtacggaattaattttatacccggaagcataggtccgaaacctcgtttatactcatcttctgaagaaagagataccgcaagcatcgttctgccgtggaagttgccgatacacgcaatgatttctgcctgattatcggctacccctttgacctcatatgcccagcgtctcgccgctttgacagctgattcaacggcttccgcccccgtattcatcggcagaatcatatcttttcccgtcagcttggctgttttctcataaaacgggccgagctgatcattatgaaacgcgcgtgacgtcagagtgattttatccgcctgatccttcagcgcctgaatgatcttcggatgtctgtgtccctgattcacggcagaataagcactcagcatatccatatattgattgccctcagggtcttttacccaaacaccctgcgcttctgaaataacaatcggaagaggatgatagttgttcgcgccgtaatgtgaagtttgactgataatttcttgagattttgtgaaagctgacataatctgattcccccttgttttgtaaacattcaacataagctcttgctttccctttttataaagcaagttccgtgccaatccgaaaaaacgggatgtttcggcaaaattctttctcttcctgcaaaattttcatgcggtttgcaaccaaagctcagcaaagcgcaaaatttttttgcgttttcgctgacaaaaataagagcaatccaattagattgctcctattcagcagttatttattcaattgtctttgatatacaatataagaacttaatacagaaaatatgatacagccgattgcagcaatgaaaatggctgatattctatacactggcggaaaaaaagctgaaagcatcatgataatgcccgctaagacaaaaagttttgaactaaccctgtgtgtatccttccaaactttttcactgctcagcgtccacggtgttcttatccctaaaaagaaattaggcttaactatctgaataaagtttccaaacaccataaaaataacgcccactataaagcttcctaaataagatatagggaggtcatatcccaggccggtcaagatgatcataagattaatgacaaacattaccgcaaacattgtattaaatatagccatatatggcccgataaatgttttgtagttatttttaggatcaatcttagggatgataaccattaaaatatatataataatcattatgccaataagcatcatcatcgcattagctttagcttggtaatcatttgcacttccgtttaatccccagtgtatcgccaaattgtccggtaaagatgaatatgtgaaagcccatgttaaaacagttaaaacaatgagtcctgccgaaaagatatattttttcatgattccccgcctttcttcttatcatgttctggttcagccaaagaaaagaaccagcctataagatcctgtaatacagtggtatttaatgaatacataataaattgacctttcctctcatcgtgaactaaatcagtatttttcaatatgttaagatgatgagaaatactgggttttgacatttcgaagtgttccgcaatttcaccagctgtcatgtcttgtttcttcaataaatctaaaattcttctccttgtaggatcggctagtgctttaaatgctttattcaagtactttccccctctcatatatgatttagatatttaagtatatatctaaatatcaaccattttcctaaaaaagtcaatggtttctttacctcaatttccatttatttttaaaaatcagcaaagcgcaaaatttttttgcgtttccggctcaatttattttaaaataatgaatgttaagacgattgggaggggaattgacctgcacacaaccagcgaatttttcacactcgtattacaaagcattctggaagagattgatgtcgggctgcatgtggtagacgaaaagggcagcaccgtcatttacaataagaaaatgatgcagattgaagatatggatgaacgggacgtcctgcataaaaatctgactgatgtatttatgttttccaatcagcaggacagcacgctcgttcaggcccttcaggaaggcaaaacgattaaaaatgtgaagcaaagctatttcaataacaaaggccaggaaatcacgacgatcaatcatacctttccgattgtgcaaaacggggagatcaagggcgccgtggaaatcgccaaggacgtcaccaagctcgaacggctgatcagggagaacatgcacagaaaagaacagaacagctatacgtttgacagcattctcggcaacagtccggtcatccgggaagtcatcgaaaacgcaaaacgggcaacccgcacgtcttcatccgtgcttttggcgggtgagacgggaacaggaaaagaactgttcgcccaaagcattcacaacggcagccagcgctcaggcgccccgttcatatcacaaaactgtgccgccttgccggacagtctggtcgaaagtattttattcggcacgaaaaaaggcgcctttaccggagccatagaccagcccggcttatttgagcaggcacagggcggcaccctgctgctggatgagatcaactctctcaatctcagcctgcaggccaaactgctccgcgcccttcaggaaaagaaaatcaggcgcatcgggtcagctcaggacaaaccgattgacgtccgtattatcgccacgatgaatgaagacccgatcaccgccatttcggaagagcggctgcgcaaagatttatattaccgattaagcgttgtcacgctgatcattccgccgctccgggagcgcaaagaggacattctgccgctggctgaagtatttatccagaaaaacaatcacctgttccaaatgcatgtcgattcgatcagtgacgatgtgcagcaattcttcctggaatatgactggccgggcaacatccgtgagcttgaacatatgattgaaggcgccatgaactttatgacggatgaaacgacgattacggcggcccacctgccttatcaataccgcatgaaaatcaaaccggctgacacggatgccaaagccgctccaaacacccagcccggcaccgatttaaaaggtaaaatggagaattttgaaaaatatatgatcgaaaacattctgcgaaaacaccgcaacaacatatccaaaacggcacacgagctcggtatcagcagacagagcctgcaataccgcctgaaaaaattcgggctggagcggatgaaatgaatccatactgaaaaaaggctgagatgctcctcagcctttcgtcagcctatgtctgattggcttgatgccaccactccattacctgaatttgtcattctggttcaaagctcgactttattctggatggcgacactcgctttcagtctgtaaaagctgagcatcataaacagcgacaataagatggataataccccgattgcggtcagcagcaaggctgaatcaaaataatccgttaagaatccgataaacggaaaggcaatgaacatgaagagagaggtcatcaaactgataattgacagcagcgtggctctcgttcttgacggaatctcattattcactacctgactggatacgggctctatcacatcatagagcgcattaatgacgacaaaagcggcaatcgtcacatacagactgcctgaaggtataaacagataggctgccccgatgatgcagaatgtcagcagaagcacgcgcctcggcgtgaatttttccgccggctttgaagaaaagatggagcacagcgcctgcaagatggacagtcccgcaaaaataatggatatattgcgcacggacagcccttcctgacttaacagatcttgtccgtacatataaaaaaccgatgtgagcgcaaagaaaacagagagtgacagcaccagatatttaaaggctttgttcagcctgaagaaatctttgacttcttttaagatgtcaccgaccgtctgcgtttcgtgttcactgttttcaaatttgatttccgtcagctgtgtaatgaccgccattgcaatcagctgagtcacaatccccgcgataaacacataagcccatgatatttcctgtaagtaaccgccgatgcccatggcgatcgcaagaccgagtatgacaagtccgttatagtttccgatggatttgccgtaccacttttccttcccttgttctttcagtgaatcaaacaaaaaggcgtgatccgttcctgatataaacgtcagcccgacgccgtatataatatgggcgatgaagagggcgatgaagttatgaaagctcaggaacatcgccaaatagacaatgaccataaaatggccgagcaagagcgatttttttctcccgattctgtccgagatgacgccgcttggcacttccgccagaaacatcgccaaattcaagaccgattgcaggatgcccacaagaaacaacgaataattcatacttgttaaatataaaatccaaatcccccgttcgaaaaaaaagtttccgaaaaaaccggagaagtaaagcaaatttctattccgcacatgaatacccctttccagctatctgcatttaacatcatgaacagaaaggagcccgtcagtcttaacacaaaaaccctctatacatggatcttgcagatacagacttttcccaaaacaaattgggcaataatgagttgtattctcgaataacccaaaaagttccttcttttttccagcacctctctgatgccgccttcatatagctcatgcacgtaagacggaagaataatcattgaaatggctgaaatcgggagatgataagtccgcttcggatcagttctggtttttccaagaggggcggatcttcctccggcttctatttcatcagacggctcgcccatggtaacgtcaaatcgttttttcctattatgttcacccccggctgatcgccttttacaaacggtaaagcatgttttatgtcagaaattgctgagctggggattttgattatttcggcacctatagtccgggtgaatctcaatactcttgtatgagcggcatctttgcgggtcagcagacttatcccggcagccggataatgaacacggagccttttccctgctcacttttcacttcaattgttccgttatggctgtcgataatggtttttgtaatggcaagacccagcccggtgccgccgtatttacgggatcgggaggtttccgccctgtaaaaccggtcaaacaaatgaggcacatgttcgggggcgatgcccgttccattgtcagcaatcatgagcatgatgccgccgtctttctgcagagaaacggtgatgacgcccgtttcttcatccgtatgctgcaccgcgttgtaaaagagattgagaatgacctgcttcattttgtccttgtcaaaaacggctttaatctgttgatcgacaaaaaactcgagcttccggtttctcgccagcagcttcagctgagcctccatttccaaaatgacggctcccagtgcgcctttttccatttcaaagctcggcactcggtcaatcttcgcaagaaacagaaggtcctctatcagcttattcgccctgacggattcggcgtacatgcttcggagcgctttttctttctgttccggcttctccgccgctccgcgcattaaaatttcgataaagccgtgaatggaagtaagcggtgttctcagttcatgtgacgcgtctgatacaaactgccggatgcgttcctttgcttctttttccgcctgaaaagaggtttcaatccgttccagcatctgattgatggatatgcctaatgactcaatttcggcctgctttttatcaatcggcagccgtttatcgagactgccggcattgatgtcacccatcatatgcacaatgcgcgataatggcttgagtgtgagccggatcaccggcaaaaaaacaaacagtccgatgaccaaagccgcaaaagaaagcaccgcaaaaataccgacctggcggaaaagcgaatcatccagaggctgtgtcagcgtgctcatttgcacaacgcccgcctgccttccgtcaatggaaatcgcctgaaatacgacgatgatttcctgacccatcttattgtgagccacctgatagtgaagcgccattgtgtctgtcagcgcatcccgatacacgtttttcgggaaagaaggagcggttcccgcgtgcgggtcctctgataaaacagacatcttgtatgattgatcgataaaagcaaccgtcaccccgggataaatcaaattcggatgagccggtgtttcagaacgggcaagggttttgattgacctccatacgctttgatccattgaattgatatagctctgaatgctgatcgcctgattttcatacatcgtccttttcataaacatgtactgcgtgccgccgatgaagcataacagcagggtcaaaatcgccagcgacctgaacaggagctggaatcgcagggttctgtacagccgcttcatgccagatccaccctgtaccccgcgccccgcaccgtgcggatcactttatgctctttgtctttcagcttttcgcgtaaagaacggatgtacacctcgacgatattgtcttccccgtaaaaatcatagccccatacttgatcgagaatcctcgttttactgagcaccgtcccgtggcgaagcactaaaaatttcagcagttcatattcggtggcagacagcttcaaaggctgttcattgtaatgaatctctctgctccggtcatcgattcggaaagggccgagcaccacctcatcaaaaagatgcggaaactggttgcggattcttgcgtaaatccgggcaagcagctcctcaaagctgaacggtttgatcatgtaatcatcagccccttcaatcagcacctttacgcggagctctacttcatccttcgcggtcagcataatgacggcggtattgcttgttttcttgagcattcttgacagctcaagcccatccattcccggcatcataacgtccaaaacagcaatatgaggctgaaatgttttaacaagattcattgccgacatcccgtctgccgcggacatcacttcaaatccttcattgacaagccccatcgttaaaaaatcaatgatcgccggctcatcgtctacaatcagcaccttgatgcctttcaacttatccatgatgcagtctctccttagatgtatcagcctgagtttatttttttcgcttccccctctattattcgcttttatctgaaacaaaactgaatctaagctgaaaatccgctgaattcaggaagttttcagcttgtcctcatattgttttcagcttgggtctttacaataagccttagttgggacgccaacgatgaaatgtttaaggaggaatatacgatgggaattacaaaagttttatcaggagctgcactggggaccattctttcaatcagttctttaacttcagcacatgcggctgtcattcataaggatagcgctgcgcaggcgaaagtggaaacgaaacaggaggcttccgtttccatagcaaaagcgaaagaagcagcattgaagaattgcagctgcaaaggcgccgttcaatcagcgcaaatgaaaaaaatcaacggcgcttacgtatatgtcgtcaacattcttgacgtaaaaggaatgcagcataccgtcaacgtcaactgtgacagcggaaaagtcgtgaaacaccagattgaaaaaaaacagcaattcatttcaaaaacgggtgctgaaaaaattgccttgaagaattgcaaaggcgccgtgaagtctgctgagctgaagtccgaaaataacgtcatggtttacgtcgttcaagtgtcaggacaagacggcaagcttcacacaatccatatcaactgcaaaaacagcaaaatcgtcaaacatgacataaaggataaccagcaatacatgacccgtacaaaagcggaatcattcgcactcagccattgcaaaggcgccgtgaaatccgctgaaatgaaaaaagaaaacggcgtatctgtatatgttgtcagcatattcggccaggacggcaagctgcatacgctccacatggacggcaaaagcggtaaagtcctgaaagaagacgtgcagaaaaaacaagtcatgatcgcttctgaaaaagcgcattccatcgcgctcagccactgcagcggaatagtgaaatcttctgaaatgaagaaagaaaacggcgtctacatgtacatcgtcaaaatcactgcccaaaatcatacggtacagacagttaaagtaaacgctgaaaacggaacaatctgcaaataacaaaaaaataagctgccggcagtttcatctgccgcttcaattttgcaacaccagtcgtttcaatcacaaaaggttctaagttcatgtctgccttttctaaatatacccattttcaactgaacgtgctgtgacccgcgttcagttcttttttgtgagctgctgaaaaatggcataaaaaaagcgccctggaaaaggacgtttgaggataggatttaaattctgcattctaatataattcttccttcacattcaccttcaatttcattcaatacaatgatcacatcagctgttttcatgttttttcacccccttttattcataatattaacaaataaatcaataaaaaacagcccggatttccgggctgcttttttatttctgcaatcgatccgcttctgtcagtttgacttccgctgtttttttctttcctgaacggtagaacgtgatcttgacacggtcgccgatctttttgcgatacagacgctcacggagatcgacaatgtcattgaccttatgtccgtcgaatccggtgatcacgtcgagctttttcaagcctgcttttccagccggtgaaaacgcgtcgacacccataatgaccgctccggttttaacacccttcggaagtttgagcgtctggctccaatggtagctcgcaatatccgttaaagatttcatctcaataccgaggaaaggccgtctgacttctccgtatttttctaaatcctgaataacgggaatgacaagctttgacgggatggacaggccgattccttcaacggcggattcagcaatcttcattgagttgatgccgaccaccttgcccgatatatccatcaaagcgccgccgctgttgccgggattaatcgcggcgtcggtctgcagcacttccgcattccaatcaggctgtccgtcgccgtttgagtcaacgggaaccgccctttccgttcctgaaatgatcccttgtgtcaccgatcccgcaaattcaagtccgagcgggtttccgatcgcaatgaccggctcgccaactttcacttgatcagaattgccgaattgggcgaccgatttgattttatcagtcttcaccttcaacacggcaagatccatcagacggtcgctcccgatcagctcggcaggcacgcgcgagtcatctttcaggctgatctcaatttcagtcgcaccttcaatgacatggtgattggttacgatataagaagtgtttccgttctttttgtaaatgacgccggacccgcttcccgcttcgccgccctctccccaaatatcggtcttttggatattgagaacgccgactaccgaatccgatacacggctgaccatattcgtgacagcatcattgatatttacgttgactgttttcacctgttcgctgccgatgcgctgattggcgcttttgctgctttctccatggtctccgcctgtccagtacggcagcagtaaacccatgagcgcggccccgacgatgacaccgatcagacttgaaaggaagtatcctctcttgctgcggcggggctgctcgggggcgtactgttcatcatcgcgattataatccaccctatctcaaatcctttcaagagaacttaatttgcttatagtgtgggttagatcgcggattaataatcatgattcatttggaaaaattacacggcgcacagaggcgtcgggattttcggatcggtatcaaataattgaaacgtttcccccgcgacaaatccttttgcagccaatgtctgctgcacggacattctcgccagttccttcatattgttgtcttggctcagatgcgccaagtagatgcgtgatgtgccgtcgccgatgacatcagtcatggcgagcgccgcgtcttcatttgagacgtggccgacatcgcttaaaatccgccgtttaatgctccatgggtatctgcccatttgcagcatgccgacgtcatggttgctttcaaacacaaacacattggccgaacggataatgcccttcattctgtcgctcacataaccggtgtccgtcatcagcgcgagctttctgccttggtagtggaaaacatagaacatcggctcggccgcgtcatgagagacgccgaatgactcaacatcaagcccgccgaaggatttcacgctttccatcgggaacaaaaacttttgtccggtgtccagcttgccgatctgattctccatcgctttccacgtcttttcattggcgtataccggaagaccgtactttctcgcaatgacgccgagccctttaatatggtcgctgtgctcatgagtgacaaagatgccgtccacgtcgtctatcttacggccgatttgctccatcagcccgtccatcgcttttccgctcaggccggcatccaccagaaaggagtgctcctctgtctccagataaaacgcgtttccggtactcccgctcgcaagcacgctaaattgcaagcccatttgtgtctcactccattatttattttgattgttatcaatgactgtgctttctaatgcattcacagtgtacgtctgctgtgtctttttcttaggcccttttgacttatcttcaattgtaattctccataccggcgccagcacctgcgtacttgtcagcgggtattgggcgatatagccgaacttgacgcttttgacggcgcaattcgcttttaagtaattttgagaatacaataattcgaccgcatccagctctggaatcaggctttccatctggattcgcttgaatgactccagcatggtctgctcgtaagatacgacctgatttttatcgttcagatgcagaatgacctgtccgatcgcgtcagaggacgagtcaaaatcctgataaataaactgtccgtcatacgtctggtaaaaaatgatctgttttttatccttatcgactttccacagtttatatttttctccgccggttattttggagctgacgagcgattccgcatcatcctgcggcttttgcttcgataaaccgaccggatcggaaaacttcattctcagcgtcgtgaccttgtgatcatccgtcggcatctccattaacggcttctgatccttcaaggcttcaatatcttccgcggtaaataccttttggcccgccgtcagcctgtagcccgtctcggaatcagaagacaggttcccgaatgtgatatgatccatctccatgtctttttccacatttgaatttttaatcacttcgtattcgctgcttgaacgtttttcaaaaaactgatagccgagaaaaatatcaaggatgaggaaggcaatgatgaagatcgtttttgtcttattccactccattatcgtcctcctccttccccagcagatctttcgtaatcggaacgattttcccgttgattttcatactccagacgggttccagctcaacaagatcattcgttgacgaagataccatttgataggacaggaagatctggtcgattttgttcacatcgtatttatcctgctgctccagcagcgacacaacctcactgccgctcatcatttttacgtcttttgttttaatcggattcggcccgagaacatagttcggccgcttatagctgagaacctcgtcattggcccattgcagggtcataacaggcccggctccgaaaggcttagacgtgctgttgatgacaggcatttgatctttaaacatgtagaaactcagctgctggttatcactcacattgaaaaattgataatgatccgtccagctccccgtatcctctaaatatttatagcttttcttaatcagctctcccgtttgataagaagcgctttgcgccaggttccggtgctggaattgaatctgccgctgcgtcgaattgatttccagacggctgattccgtcagtcagcacattccgattgtaattcggatcctctctgaccgtgctcggatcattaaagagcgtctgcttaaacagattcgtcttaatggtttcagtaataaattctttttccttcatattaaaccgcgaattcggcatgagaaattctttgctttttccgaccgaatagaggtggtataacggcatactcgattttttgctgtacagctcattcatcaggttgcggtaattcgccgattccacagtcacttccagaatcagctgtttgctgtatgagaccatgtaaatcttcttattcgctttattctcattaaacggaatgacaatatggtcaaatgagctgtattccattgactgattcgaccatttaaacatcgattggaagaaatcaatcggaatggtgtcattgaattgcagatcgagctttgccgaatttccgtttctgccgtaaagccaatttttaaaaccgagcttgtcgtattgatcggaaatatctttcatcccttttacttcccattgcggcaaatccgcccacaggtcattaaagagcgtctcatcatccactttgtaatgagagccgtttgtatgaataaacatatcccggggttttaccgtttgcgacaatttttggctcgttttatcaattttatgcttttcccggacagtcgatttggttgaggccgtgccttctgaaaaattgggctggaacgtccaaattccccatgttaaaacaagactaatgacgactagcaccgacagtatgactgtttttatattttcacgcctcatcccaatcatcctcttgctcttctttatatggaagagtaaatgtaatcttcgttcctttgccttctacactgtcggcccaaatgtcaccgccgtgcgcctgaaccatctcttttgcaatcgcaaggccgagcccggtgccgccgagttttctcgtgcgcgctttatccactctgtagaaacggtcaaagactttttccacatcttttttcggaatgccgataccttcatcttttacactgatgtagagcagctcttctttctcattcacatcgactgagaaggtgacatgtccgccttccggtgagtacttcaatgcgttagaaatgatattatcgagaacctgcgtcactttatcctgatcaatctccacgtacagatttctgtccggcagctcgcggataaattcgacatgctgttcctttgtcatttcaaaacggtcaataatcagagacataaagcggatcatatgaatccactctcgattaaactgataatctttgctgtcgaatttagaaagctgaagcagatcattcaccaatctgatcatgcgctcagtttcattttgggtcaccattaagaaacgcggagcgatctctttattttcccacgcgccctctgcaagcgcctctaaatagcttcgcattgtcgtcagcggtgttctcagctcatgagacacattggcaacaaattctctgcgctcccgatcgagtttttcctgttcggtgacatcataaagaaccgcgattaaaccatcaatttttccgtgctctctctgaataacggaaaaattcacccgcagtacagtcgtttcatcgtcacgatcgatctccagcagcatggaatcctgctgttctactaaatcctcaaaagtaaagttctcttttatgcccaataaagatgtaatcggcatctctaaagccgtttcacgtgaaacattcaacagctcaagcgcagggctgtttaaaagaataatagctccgttgcgattcgtagcgatgactccgtccgtcatatacgcgataacagaagaaagcttccttctctccccttccgtcatggcttgggcatcttcaagctctctcgtcagatggttgaaggtcgttgcgagctgaccgatttcatcatgcccgtattttcgaacctttctggagaaattcccttttgccagttccatcgcctgcttacgcatatccgagagcggatgggtaatggtccgggcgagaaatataccgagaagagccgtcagaacaagggctaagcccgttccggaagcaagaatcgagttgacggttttcatctggttaaaggtatcttccatactggccaccacataaatcgcgccgacaacttcctgattctccgtgacgaccggttttgccgaaatcagcactctgtttttacttttaggatcataatatttttttgaataggcctgttttgtagagaaaatccgtttgaaaatcgggtcagtcgtctgtttccccgctatttcctcgccataaggcctcgaagaaccgatgacctcatagcttttatcaacaaaagtaatttcccgtatttcattatttttcgtaaaatcattcaaaatacgtttgacgtcatccttaatgacggtgctgtcattgtcccctttatattcctgttcaatataataggaaaggttgtcaatccgctgatttaacgatagttcataggacttgaggagagaattctccacctgtttcacaaagtacacgccgataatctgcatggcaatgatgatgagaagcacatagatcagcgtaatcttaaactgaatcgaccgaaaaaaaccaaccttattcatcgccggttagtcctgttcagggtttctcaagtaataaccgacgccccgtcttgtgacgatccaattcggatggctcggattatcctcgattttctcacggaggcggcgcactgttacatccaccgttctcacgtcaccgaaatagtcatagccccacaccgtctgcagcaaatgctcacgcgtcatgacctgtccgatatgtttggccaagtaatgcagcaattcaaattcacgatgggtcagctcgatcgtttcttctctttttgatacgacatatgcgtcagggaaaatgacgagagacccgatatgaatgtcatttgaagctgattcttcctcagccggcgcaaccgtaagctggcggcgcagattcgctttgacgcgggccagaagctcacgcgtgctgaaaggcttagtgacatagtcatccgctccgatttcaagcccgatgaccttgtcaatctcagagtctttagccgtcagcataataatcggcatatcatattttttccggacttcccggcacacttcaactccgtctttattcggaagcataatatctaatagaattaaatcaggctgaagctcctccaccatttccacggcttcatttccgtcgtacgcacagtgcacgtcatagccttcttttcttaaattaaactctaatatatctgcaatcggtttttcatcatcgactacaaggattttcttatccatcatcttgattttcctcctgccagaatgacttcattttatctattgatgttttatgataatcacaattcggaacgtgaaaaacgttccccgtctattataacggtttcaggtcaaaagataaaaaaattaaagagaacagcgcaaaaacgtattgaactgccatccttttgtcatgttttttattttcttttaaaaaataatatttttttgaaacctcacgaaaaaaatcgccgtctactgtttgacgtcttcttctgggccggctgaaaagccggctctcccttttttgataacaaagaaaaaaacgcacctactattgcagatgcgtttgggtaagtggctcgggacggaatcgaaccgccgacacacggattttcagtccgttgctctaccaactgagctaccgagccagatgtttcttttctatactataaagtaaagtaaaatggcggtccggacgggactcgaacccgcgacctcctgcgtgacaggcaggcattctaaccaactgaactaccggaccttacagtaatttgtccggagaaccgtatcgtggcggctctccgaggacaaataaggagttagcaataacgctaaagtaaatcaatgacccgtacgggattcgaacccgtgttaccgccgtgaaagggcggtgtcttaaccgcttgaccaacgggccataaaaagtggtgagccatgaaggactcgaaccttcgaccctctgattaaaagtcagatgctctaccaactgagctaatggctcttgatgtgtcggattatgtatcatagagcattcagacaaaagctttcttgcagtactctattgaagctgttccgtaacaacgagatttataatatcatagaacattcgaaagtggcaactacttttttgaaaaaaatctattatttttttcccacatacaaaaacaagcctccggtcacggaggcttgtctgctgcaaatccttagttagcgcggtatacactgcggatgacgttcgtttgtgaacggtcaggaccgacagagaaaatagaaagcggaatacctgtcagctgagacacgcgttccagatagtggcgcgcattttcaggaagatcgcttaatgtttttgcgcctgtgatatcttccgtccagccaggcatttcttcatacaccggttcacactctgcaagagctttcagacttgccgggaattcttcaatcacttcacctttgtagcggtaagcgacacagattttcaaggtctcaatgcctgtcagcacatcgattgagttcagagaaagatctgtgattccgctgacgcggcgggcatggcggacaacaacgctgtcaaaccagccgacacggcgcgggcggcctgtcgttgtgccgtattcgcgtccgacttcacggatttgatctccgatttcatctttcagctcagtcgggaaaggaccgtcaccgacacgggttgtgtacgctttagatacaccgacgacgtgctggatttttgtcgggcctacgcctgaaccgatcgtcacccctccggcgaccgggttggatgaagtaacaaacgggtatgttccttggtcgatatcaagcatgaccccttgagcgccttcaaataagacacggcggccttcatccagcgcgtcattcaggacgacggatgtatcgcatacatactttttaatctgctggccgtattcataatactcatccagaatatcttcaattttgaagccttccgtttcatacattttttcaagcagacggtttttctcttctaggttccgttcaagcttttctacaaacacgtctcgatctaacaggtctgcgatccggatgccgatccgtgccgctttgtccatataagcaggtccgattccttttttcgttgtgccgatcttgttggcccctttgcgttcttcctctacttcatccagtttcagatggtacgggagaatcacatgagctctgttgctgattttcaagttatccgtgctcacattgcgttcatgaagatacgcaagctccgttacgagcgctttcggatcaacaaccattccgttcccgatgacacacgctttttctttataaaaaattcctgacgggattaaatgaagcttgtacgtgactccatcaaacttgatggtatgtcctgcattgtttccgccttgataacgtgcgatcacttctgcattttctgacaggaaatctgtaattttaccttttccttcatcgccccactgcgtacctactacgactactgaagacatatatccgtgcacctccgttaacctttcaaaacgatatctcattcaaacaaattaagtgtatcagtgccgatgcagaaagtcaatcgtaaatccgaacattaaaatcttatcattctatatttgttcgccttaatctcaattaaaagcgttttctctttcatttgttatctattactcacgaaactttcacgctttaataagaaaaagaacccataatccgggttcttcggacagccgcttatattccgcttgtattcatcaggacgatccgccagccgtcaggatcttcgatggtcacgcctttttcaccccaatacgggttttcgggttctttttcttcatatcccatttgctttaatttcgtgctgatgcggatgacctcctgctgatccgggatgtagaagacaagctggctgtcgccgtgcggaacgggcgccggctgagatgcgccggtttcttcagtgaattctaagtgatattgggtatggggcaggccgaacatgacgccgctgtagccctcatggccggaaaagctgccgacccttttcagtccgaggccttcttcataaaacctgatgatttctttgagctgtccggtcggccgggcgatccggatttgcgccgcttgaaattgcggaaattcaattgtcatcatcattccccccttgatgccattatataaaagcgctttccttttttcgtctgccgaacggttgtcattctctcgttctttcggatgaaaaaaagcctcaagacatcgcttgaggctttacgcacctgccggaacaccgccgtcatcaaagcgcctttccaggtttacgaacttattgtattctttcacaaaagccaatgaaacggttcccaccgggccgttacgctgtttggcaataatgatttcgatgatgtttttgttttcggattctttatcatagtaatcatcacgatacaggaaggcgacgatgtcggcatcctgctcaatacttcctgactcacggatatctgacatcatcggacgtttatcctgccgctgctcaacaccccgggagagctgagacagagcaatgaccggaacttcaagctcccgtgccagcgcttttagcgcccgtgaaatttccgatacctcttgctggcggttgtcgcttgaacggccgcttccttgaatgagctgtaagtagtcaattaaaatcatgcccaagccgttctcctgcttcagcctgcggcattttgaacggatttcgctgacacggatgccgggggtgtcatctataaagataccgctgtttgacaggcttcccatcgccatcgtcagcttaccccaatcctcttccgtcagatttcccgttctgagattttgggcgttaatattcccttcggcgcagagcatacgcatgacaagctgctcggcacccatctcgagactgaatatcgcgacgctctcatccgttttggtggccacgttttgcgcaatatttaaggcaaacgccgttttccccacggacggacgggctgcgacaatgatcaaatcattccgctgaaagcccgccgtcatccggtcaagctcgataaaaccagtcggaatcccggtaatatcgcctttccggttgtgaagctgctcaatgttgtcatatgtttgcacgagcacgtctttaatattttggaaggcgcccgaattctttcgctgcgcgacctccataatcgttttttccgcatcgcttaataaatcttcaacttcatcctcgcgtgtatacccgtcttgggcgatcgtggtcgccgttctgattaaacggcggagaatcgatttttcctcaacgattttcgcgtaatattctatattagccgctgtcggaacggaattcgcgatgtctgtcagatacgagacgcctcccacctcttctaacaggtcggtattcgcaagctctgacgttaccgtgatcaaatcaaccggttcgccgcgatctccgagcacgagcatggcattataaattttttgatgtgacattctgtagaaatcatccggaatcaacacttcagaagccagtgtcaacgcagacggctgtaaaaaaacagcacctaacacggcctgctcagcttctatgttttgcggcggcagccgatcattcagaaggtctgtcatgctaagcaccgtcctctccttaaaaaatatccaaactccattttaccatttctcatgaaaaagaatagaaaaatatcgctttccctgtatttgtcagactatggatatgtgtttcaccgttccgaatgctgggaaacatataaataaatcgataccaggagggaaaaaagatgaaaacatatgcggtaacaccaagtgttgatgcggacggatggtttgtgaaggtggaaaatgtggcgccgacggctctttatacctcaaaggacgcggcgattgaaaaggcggagcagacggctaaagagaacagcccggctaagcttgtcatttatgatcagcacaaaaacattgaagaagaacgaaccttttgagaaaagccttcgcccgtgcgagggcttttctcattcaatgaagcgaatacgcagcaccgtctgcgccatgagatcggccgttttttgatacagatcccattcttcacaggcggcaaatactttcatcatttcctgcaaggtctgtttcagcaagataaattcgtcaattgtccgcagttctgcggcttttttctgataatcagccagcttcagctgtaataacattaatggcgattgcataaaaaacctcccccattctgttataacgcccggcttttcaaacctccatttctttgtcatatcctcttacgatcgatttttgattttagtacaataaagaaacggaaggagtgataacatgaaaccgctgcaaatttccgccgaaacggcacaaaagcttgcagaatcactgaacatgccgcttgagagaatcatgcacatgcctcagcacattctgcttgccaaattagctgaagtccaaaaagagaacgatcacaaataaaggctgctctctcatatatatgtgcgggaggcggaagcgatggctttccgcctctttttttatggagaaaattccggtgagacattcgttatcgtttattcatatacgctgagggaaaagtgaagtgcttcttattatccggaaacaattcaggcaaaagcttgtctcttcgattaaaaagaacggtaccaaaaatctcagctgaccaatactgcagcaccggaaaagaggccggatatcgaacgccggccttttatctgctcttgaaacacctgtcatgcctgcgcctataatatggaaccttttataaaaatgattgataaatactgtctatttttgaaaccatgatgtcctgacgcagatgctgactggcataagattttgcttcttttccgagccgttctctgagagactgatccgtaatcaatgacacgagggcagcagcaagctcgcggctattgccgggctgacagataagccctgttttctcatgccggatcatttcaggaattcctccgcattcagaggtgataatggctttaccggaaaacatagcttcgatgaccgctatggggaaattatcattcaatgtgggcagcacaaaaatagacgattcagccaaaagatccggcacatcacgtcgttttccgaggaagaacacatttgaaagacccaatttccgtctcttctcttccagaaacccccgcattttcccgtctccgattatccaaatttcggctcccgataaatgctgccgaatttgcgcgagggcatccagcagcacaccatgcccttttcgctcggtcagacgtgaaacacacacaatcacgagcttttcagtacgtttcggcttgggtgcatcctggacgtgaatgccggtataaacagtcgtcagctgtgtttccttcgcgccgtactccagtaaaggcgcgtgaaaggagtcactgatggtaatgattttatccgaagcccgaatgccctgtttttctatttcagtgaagtatgcctcttcaattgaacccttttggattttatgaaacttcatccggcttttcgtaaaatgtccgtgaggcgtgaagaaaagaggacgccgatatgttcgattaaggtatcccagcaaaaataccgcaaataaatcctgcgcgtgaaacagatcatattgttctaaatctttttccttcaaaaatctttgaaagacatgtaaatagctgagattcttcacaagcttttcgtttgcggcgccgtatctgccgagaagaaacgctctgacttcatcagcggcccgcgggatatcttcctgaaaaaatgaaggcggcatttggagcggcgagatgacatccgcatgatgaccgatgcgctcaaaacctgtcttaacggacgtgatataactcgccaatcctccgacattcgggtaacggagaaaggttgcgtacaaaatgcgcaatggcttctttcttttgggggagctttttccttccgaacaaaatgaacgcagcatcccttgctcactttgaggttcgattccgtaaaattgatccatgacgcgcaacaaggcaagaggcaccatctcttctctcaaatccgctcccccctctcaaacctataaacctaattcccgcccccattgtgacactttgtctacatgatacgggagcagctctcctccccgattgtcgaagattctccgcaattgggtatgaagccctttctcaggtgtcctctgcaaataagacattttataaagcgtcataggtggggtctgaaaatgaatgccccgctttttcatttctttcgtatacacttttacgcaatacgtccgaatgtcttccgcgtgcgggctccaatcttttctgaagccaagcagaatttcaaccagcaccgtcatatcaaaccaaaccggcgcgtattttgctgattcccaatcgatgaattgaatatcccacggttcatggccggacgcatcgtgggtgcaaatattctgcatatgaaggtcgccatgtgtaatggctgagccgttttgcatcaattcagggaaaaaatccggcccttttcgctccagcaggtttgcgatttgccggtaatgaggctttacgatatcctttgttcgatcatctttgagggcccgatccagtaattccgctgtctttttgatctgctttttacgccccttcctcatggtttccgattcatataccggcagccatgaccgccatttcccgtcagaaattttcttgttttcaaaggtgcggctgtgcagttcagcaacagacggaataatataccgaaaatgcttaggatgaaatgtaagctgtcccctgatctggctgacaaactccataaatatccacgtttcccggccgttttcttctataagatatatgtccggcatcaaatcccctaagacggcacgggctttactgtacatattaatctcggccttgtttttgtcacgggaggatttatacaccttcaaaatcagcgggacggtgccggatttctttttcacaagcagtttataaatggcgcttctgtctgttgttttcaggcatgtgatgtcatccgggttcacagccgccttttcgccaaatgaatgcgacagtttttcgtcaattctcagtttctgaaatgcttcatacaaaatatccttttcagacatgctgatcttccttccgcttccgtttccagctgtttttgagatgggaccaagtgtttctgataaacggcattgggtcattccaagcaaaaagagcatactccttttttcctttacaccctttccaaaaatcccggaacgtcatttctcctctttttcgtttcttcaaaaacgttaagaagtaacgcacttcataaatccaattgattccctctttttgctcgagctgaggcttcacatgctgtccggtcaaatacagatagtacatgtaaacaaaatgaacgcctgccggttctgtcagactatggctgagccaaaagcgcggattaatttctatgaatttgtaaacattgtcccgggggtcctttttaaattccgccatgcctactcctttcagctgaatcgcttcaaaaaacggcagggtcttctcaattaattcaggaatccgtttgctcacgacatgagcccccgcgccaaaatcagcagggaattgatggtttttttgcagagaaaataagcccattaatttcatttggtcatcataaaaagtggcgactttataaaaacactgattgtctccgggaatgatttcctgcacgagcagttttccattttctctgtaggagctgaactccttgcgcaattgtgtctcatccttcatcacaattgctttcttgtttacttttttcctgtattcatggccggacaccggttttaaaatacacggaaactcaatattggcgatggcctcttccaattcatcctgattgttcggaaaaaaggttttcgggcaggggatgttatgcttcaccgccagttcatatgctttgcttttatctaaaaccgtttctaacagagagtggctcgggagcaaaaataaaaaaaaaccggctaatgttttgcggaatttagatataaatcccgcataatcatcagatcctgcgtacagaaccggttttgcttgaaatcgcttcccgaaatcagtcagaaatgtcagaagttcttcctcttgtgttaaaggactgggacatatcccgcaatctgctaatcttgattttccgatacgataaggtccctccgtgtcaaacgcgtaaacatctattcctcttcgggccaggcttcgaatcatcccgatcccgtttgcactgaaatcaagtacaacggccgcatgttcatgtttcatgatttccctccgagcttgatggtattttgataaatggattcgatattttttatcatcgtctcactgcttaaatatttctctgcgtaggcctttgcatttaaagcagctctctgccgcgcaggtttgttagagataaaaaacgctaatgcccgggcaagatcctttgcattgcccggttcgacaataagccccgttttgttatgacggatcagatccgggatgcctccgcaatcggtcgcgatgatagccgagccgctgaacatcgcttcaataatagaaatgggcagactatcattaatggtcggcagtacgaatatgtccgtctcttccaaaatagcggcaacatcatctctttttcctaaaaaggagaccattgatagtttcagttttcgagcctgttcctccagagcgctccttctctctccgtcgcccacgatcagcacttctacatgatcaagtacatcagacggaattcgagaaagtgcgtcaagcaaatgattatgcccttttctcgggcctaatctcgcaatacatgagatgatgattttatttttcggtaacggcgttttctttttcaagcctgtttttgcatcgtaatcgattcctgtgaccaccgttgtcatgtcttcctgtacggctccaagcttcatcagcgggctgcgaaacgtatcgcttataataatcaggcgatctgcgtattcaatggctttcatctctagttttttgtaataagcctcttctaccgagccttttttaaatatgtgaaacttaagtctgttgaaagtaaacatgccatgcggtgtaaacaataaaggttttttatagatacgattgaatctgcctaatatattggctgtaaataaatcctgagcatgaaacacatcatattttcccagattcatcttttgaagcatttgctcatatatgaacatcagccgattatttctcaaaatatgatcgttataatccccgtatctgtctctaaagaaatcttttaataacggaacaacagcggtccgcagtttttttacttttgcggaaggaaactgattgggggatatgacatccaccttatggcctctctttttcagtccctcactaagtgttttaatatagttggataaaccgccggtgtgcgggtagtcccaaaatgtggcaatcagaatggataatttcttttttttcctgtatactcgcggaatacgatgtgactgtttcatctgggtcttgattgctgtctttttttgcgggcgtgttttgaccccgtagtactgatcaagcgtctggaccatatatggatatgggatggtaaacatctcgttcatttccagatcctccgcacgacttcaaatgcctcggcgtattctacgcctgctgtcatccctctgactcttcctaaatgtttaacaccttcatatgaacggggatgaggaaaatccctcatttctacgtcatagtggtgaagcgccgcaagtttggcgtccatcgtctctgtgatatcaacgaagtaattgggcttgaagagtttatcggccgtattcctctcccactcgcttgaagacagcgtttcaaacgtaagcagttcaataggcttttgattcggaagaggtctggcggctgtcaaaactgcttggaatgttctctggtgatccatattgatatcaccgtaatgatgagtaaagattttatcaggctgatagacgcgaatgagctgttctaattctttgacaagcttatgaagagggatacattcaagttctaaattcgtatgctctaaaaagatgactttctcaattccgagctcttgattcgcctgttcgcctaattgcttaatatgatgcgcttcttcttttctgcctaatgccgtaataatggaaatcactttatatccttcattgatcagccgttttatggtgcctgctgaccccaatagttcatcatcaggatgagcaccgatgaccataatgtattcttccattttttccacactccaccaaacaaatgttacaaatatcatatgacgaccccaaaaaaaggaaacttacatgtgcggattttcagaaacttgcatgtgcagctgccattccaggtaacgtgacggatctaattttttcacagtgttcaaaaactcagccgccaagccgtatttttccaacccttttaacagttttacgggcactcgggcatcggaggaaaaggctcttttatggtcgatgactttaagttcaccgtgttcgttgatcaaaatgtgcctgatttcggcatcccatctggtaaaaccgagatcctttaattcatccagcatatttaaaacagcggctgtcagttctgcggatagagatttttctgttttgatatggctggcaagggaggtgccttggacatattccatcacaatataatgatctccgtattcatgcagccttggaatcaccggtgaaacttgtccgatctgaaaagcggccaattccttcttgcatgtctcttcttcaaaaaaatattttatgcattggttaggtgttaagaggtagacttccccgtcttttcccttgccgatcagcggatagtcctccagcacctttttattctcagggttttgaaagaagttttcagaaaaaaatcgcttcataccgacacatccttcgttatgatgtaatataatatgcaatttgataaccttcggaaatgaaacattcttatcattttcttgcgatgcgcctctgaagacataaaaaaacccgccggatcggcgggtttttcatttgatattacgcttcttcttttacgtgaaccttcagcacggcctgaacctcaggatgcagctttacaggcacatttgtatatcccagtgtacggataccgtcttggagctccagtttccgtttatccactttaattttatgcgttttttgcagcgcttctgcaatctgtttgcttgtgacagatccgaataggcggccgccttcaccggatttggcactcagctcaacagtcagctgttcaagcgtttcttttaagtccttcgctctttcaagctcagcaatcgcttcttttttctctttttctttctgtcctttcaatacgctcatgtttgtcgcatttgcttcgacagcgaggccttttttaatgagaaagttatgtgcataaccgtctgctacgtttttcatttcccctttttttcctttaccttttacatcttgtaagaaaataaccttcatctctgaacgcctccctcaaaatattcatcaatggcttccttcagccggacaagcgcttcggaaacagaaatgcccgataactgggtcgccgcattggttaaatgccctccgccgtccagcgcctccataataatctgcacattgacctcgccaagcgatctcgcactgatgcacaccgtatgttcatcccgtctggctacggcaaatgaagcttccacttcactcatcgataagagggaatcggccgcctgcgcaatcagcacctggtcaaagtactcctcttcattctcaggaagagaagcaatcgcgatattttctttatatagagatgtatgctggatcagcttcgcccgcttgatataagaaccgaccgattctttgaggactttctgcaccagaaccgtatctgcgcctttcgctctcaaataagaagcggcgtcgaacgtccgcgagcccgtgcgaagggaaaagctcttcgtatccactattataccagctaacaaggccgtcgcttcaatcatattgattttgagccgcttcggctggtactcaagcagctccgtcacgagttccgcggtggatgaagcgtatggctccatataaacgagcagcggatctttaataaattcctcgcctcttcggtggtggtcaatcacaacgatgtgctcgattttgttcacgagacgctcttccatcacaaaggacggtttatgtgtatccaccacgacaagcagcgtgtcatcatttgaaatttccatcgcttcttccggcgtgataaaccgcgaccacagctcttcgtattttttaatttcttcaatcaggcgctgaacacttgatccgatctggttcggatcaatgacgatgtagccttccttgccgttggcctgcgccaccttcaatattccgattgcggctccgactgcgtccatgtcaggaaacttatgccccatgataatgacattgctgctttctgagacaatttccttgagcgcgtgggaaatcacccgggcacgcacccttgtgcgcttctccatcggattcgttttgccgccgtaaaatttcaccttgccgttcggcattttgatcgccacttggtcgcctccgcggccaagagccaaatcgagactggactgcgccagatctccaagctccttcaaggaagaaaccgatgcgccgatgccgatgctgagggtcaaagatacagtgtgaacggatgttttttcacggatttcatccaaaatcgaaaacttcgcgttttcaagctccgttaatatgtgttcatttaacactgcgataaaccgctccgaggacgtccgcttcaggaaaatgccgtactcctgcgcccatgcatttaataatgaggtgacctggctgttcatcgtgcttctcgtttggtcatccagcccctgtgtgacatcatcgtaattatctaaaaagacatatgccagcacggttctctcattttcgtactgcttttcaatctgaatctgttctgtcacatcaaagaaataaagcaagcgctcatctcttttaatcaccactttaaatttccgctcattcaaggtgatcgtttccgaatcgacctcctgcttgatcagcggcacgacggcctcacatgtgtcatacagcgagcgcccgacgagcgtgctttcattaaagcaggaagacaaaaacggattcgcccactcaatgtaatattgatcattaaacagcataatcccgataggcatttccattaatgcctcttcgcctacttttttcaatctatacgataacgtggagatataatcgtcaatttctcttctgatcagagaatccgcacgcttaatgaaaaacaagatcacggcgagcagcacaacgccgacggctcctatcacccagttaaagtagatgctgatgaggattatgatgattgataatgcaatcaatgcatagatgggataccgaaacaacggtttttcataaaaactaggcatttctatcaactccccacctgtaagtcacactcaatttcgcgtcaccttatttcttatgttaaagcctatgtcaatgatgcctaagaggagatacacggacaggatgaacggaaaaagcacacccagcacaatcgctaatacaggaacggcttttggcatctccatctcatgacagtagaaaaaaataaacgctaatccttgaatacaaatcagcaagctgagaataaatcccccattcaatgaaaccgaatacagcatatgccctttttccaaatgcagaaaccctaatatcgtcacaataaagtacagaatgacaacgctttgcgggagtttgagctctctaaaaggcttcatcttcggaagatcggggtagaatcgccttaaaagcggccttgccatcgcataactgatgaaagcaaaaacaacaccgatcaatacgagcgcggccggaaaaagatattgaagcgtgctcagctgattttccatcagtttcatctgcttcccgaactgatctccgtaacccagctgctttgacatggcatctgccacagacagcgactcccgaagctgggacatggtgttatcaaccacattcatattaagaaacacgatgctgactacaaaaaaaacgacgccgcacagcacatacgccaaagcgccggatgcaaccgcataaccgggctgtttctttttaaagtaatatcccatagcgattcccgtacagaccgccgtaaaagcgcctgtaagcccggcaaacgaactcacaataaaactgacaggaaggctggcaagacccatccatacccccggcttcagaccgtgccgaatggtgtaaagaatgatcggcagcggcaaagcaaagagaagaatcgcccccagtaaagggaggtacacgaccaaaagggaaatgattgcaaaaatactgatcaaaatggcgccttctattagagcccttgtatttttcacttactcacctcaaaccttgtatcattctgaacatacgaatagaaaagagcagcttagacgactgctcttttgacgccgcaatgtctcattcaagacctgaattttccataaactctccaaaatacacgtatatattttaacataagtcaaaatcgtaagtaaaatgagcgcgggcagacgcaatgttccatgtgaaacattgaaacagataaacggacatccccgtgaaagaatgcccgttgtatcagtgatcctgatcatccatgaaaccagaagtatctctgtttttctttttggtttttcgtacatataacaagacgataacgataagtaagagagtggttgcctgtaaaacaccgctgctgaaaaggaagaagttctttatcatgtcccacatatagtttcacctctgtttcgtatttcctttacattgattttccctttctggaaacttcaaaacatcaggaacaacatcggaaccggggcatatgctgatagtgaaaatgaaggataaaggagattcttacaacatgactgagcggagaacattagcatggcatgaaacgttagaattgcacgagttagtcgctttccaggcaaacggacttgtgaaattaaaaagaacagaacgggaagtcagcgatgccagactaaaacagctttacagattttccatccattcgctggaacaaaatctgcgtgagctgcttcctttcttccctgaagcacccggctttcgtgaagatgaaacagaagagcgcgctgattcctccttttacagcggcggcctgctgagcatggccaaaacgtccgtgcgcaattacgccggagccattacagagacggccacacctcaattaaggaccgtcttcgtcaagcacttaaacgcggccatcaagtggcaccaaatggtctttgagtatatggaagaacacggtcattatccggctcataacctgagtgaattactgaaaaacgacgtccgcaacgccagaaaggccatcgcgatgaaataaaaaaaagcagcaaggaatgtcatcctttgctgcttcttatttttgaacggactgatctcgaggagacgttttttcccggtatgtctcaagaaactcccggttggcatctccccattccttcatctgcagcacgatcggttcaagcgacctgccgaattcggtcagtgaatactccacctttggaggcacctgctgatacacctcgcgatgcacgatgccatccgcctcaagctcacgaagctgaagcgtcagcatacgctgcgtaatgctgggacaaatgcgccgaaattcattaaaccgcttttttccgccgatcatatgataaaacaaaatgcccttccactttccgccgataacggaaagcgtcagctcaaccggacaaccttctttattcggatatacgttcatttttcatcctccatagtaccttttttgatactatatgctgattagcatctgacttacccagtattttactcgcaatcatctctccctctcaacaaaaatgcttctttttcacatcaatttttaaggttttgaagattacaccctccgcaagacgtgttaaactataaaaagattgtttacactacaaaaaaggacaaggagttattatggaaaaaattcttattttcggacatcaaaacccagacacagataccatttgctctgccattgcctacgctgatctaaaaaataaactcggcttcaacgctgagcctgtccgcctcggacaagttaacggcgaaacacaatacgcgcttgattatttcaagcaggaaagcccgcgtttcgtggaaacagccgcaaacgaagtaaacggcgtcatccttgttgaccacaatgaacgccagcaaagcattaaggatatcgaagacgttcaggttcttgaagtaatcgatcaccaccgtatcgctaacttcgaaacagcggaacctctttactaccgtgctgagccagtcggctgtacggctacaatcttaaacaaaatgtacaaagaaaataacgtgaaaatcgagaaagaaattgcgggcctcatgctgtcagcaattatttctgactctctgttatttaaatctccgacttgcacagagcaagatatcgcggcggcaaaagagcttgctgaaattgccggcgtagatgcggaagagtacggcttaaacatgctgaaagcaggcgcggacttaagcaagaaaactgtggaagagctgatttctcttgatgcgaaagagttcacactcggcagcaaaaaagtcgaaatcgcccaagttaacacagttgatattgaagatgtcaaaaagcgtcagccggaattagaagcggctctttcaaaagtaattgctgagaaaaaccttgatctgttccttcttgtaattacggacattttggaaaacgattctctagcgcttgccatcggtgatcaagcgccaaaagtggagaaagcgttcgacgtcacgttagaaaacaacacggctcttttgagaggcgttgtatccagaaagaaacaagtcgttcctgttttaacagatgcgattgcagaataaccaaaacaccccggacacctgccggggtgtttttttatagcatcgcgattttgtaagcgcatactctgacaaatcactttgacgcattttgatatgtggtatataatatatcacacacaaagcgcactttttctaattattgtaaatcagcgcaacaacaacagaatcgggggtttatacgctggaaaaacacgcttctctttcttattcacgaacaacaggaatttggcttgtgcttacaggtgctatcttatggggtgtctcagggacggttgcccagtatctgtttcagcaccgccattttaatacagaatggctgacttcagtgcgcctgcttctgtcaggcgtacttctgctcgggattgcgtaccgaaaagaaaaagggcgcatatgggccgtttggaaagacaagcaggacagaattcctcttctcttattcgggattttcggaatgttaggcgttcaatacacctattttgcggcaattgagtacggcaacgcggccaccgctaccgttctccaatatttagggccggccattattacttgctttttagcgatccgcgcaaagagaattccttcaggaaaagaactgatggccgtcttattagcggttgcaggcacatttattttggtcacacacgggaatgtcggcagcctgtctatatccggtctggctgttttttggggcatcagctcggcatttgcgctggcgttttacaccctccagccgcatcggcttttgaagaaatggggctccgccattattgtcggatggggcatgctgatcggcggagccgttctcagcctgattcagccgccttggaagtttgaaggccaatggtcgttgtccgcatatgccgcgatcttgtttatcatcattttcggaacgctcatcgctttttattgctatttggaaagcctgaaatatctgagtgcctctgaaaccagcctcctcgcctgtgcagagccgctgtcagcagcttttttagcggtgatctggctgcatgttcccttcggaatatcagaatggctgggtactttactgattttagccaccatcgctttattatctatcaagaaaaaataacctctcttttttagagaggtttttccctaggcctgaagcaccctttagtctcaattacccataaattaaaaggccttttttcgttttactatcattcaaaagaggaaaatagaccagttgtcaatagaatcagagtctaatagaatgaggtcgaaaagtaaatcacgcaggattgttactgataaagcaggcaagacctaaaatgtgttaagggcaaagtgtattctttggcgtcatcccttacatattttgggtctttttttctgtaacaaacctgccatccatgaattcgggaggatcgaaacggcagatcgcaaaaaacagtacatacagaaggagacatgaacatgaacatcaaaaaaattgtaaaacaagccacagttctgacttttacgactgcacttctggcaggaggagcgactcaagccttcgcgaaagaaaataaccaaaaagcatacaaagaaacgtacggcgtctctcatattacacgccatgatatgctgcagatccctaaacagcagcaaagcgaaaaataccaagtgcctcaattcgatcaatcaacgattaaaaatattgagtctgcaaaaggacttgatgtgtgggacagctggccgctgcaaaacgctgacggaacagtagctgaatacaacggctatcacgtcgtgtttgctcttgcgggaagcccgaaagacgctgatgacacatcaatctacatgttttatcaaaaagtcggcgacaactcaatcgacagctggaaaaacgcgggccgtgtctttaaagacagcgataagttcgacgccaacgatgaaattctgaaagatcagacacaagaatggtccggttctgccacccttacatctgacggtaaaatccgtttattctacactgacttttccggtaaacattacggcaaacaaagcctgacaacagcgcaggtaaatgtgtcaaaatctgatgacacgctcaagatcaacggagtggaagatcataaaacgatttttgacggagacggaaaaacatatcagaacgttcagcagtttatcgatgaaggcaattatacatccggcgacaaccatacgctgagagaccctcactatgtcgaggacaaaggccataaataccttgtattcgaagccaacacgggaacagaaaacggataccaaggcgaagaatctttatttaacaaagcgtactacggcggcagcacgaacttcttccgtaaagaaagtcagaagcttcagcagagcgctaaaaaacgcgatgctgaattagcgaacggcgccctcggtatgatagagctaaataatgattatacattgaaaaaagtaatgaagccgctgatcacttcaaacacggtaactgatgaaatcgagcgcgcgaatgttttcaaaatgaacggcaaatggtacctgttcactgattcacgcggttcaaaaatgacgatcgacggtattaactcaaacgatatttacatgcttggttatgtatcaaactctttaacaggcccttacaagccgcttaacaaaacaggtcttgtgctgcaaatgggtcttgatccaaacgatgtgacgttcacttactctcacttcgcagtgccgcaagccaaaggcaacaatgtcgtgatcacaagctacatgacaaacagaggcttcttcgaggataaaaaggcaacatttgcgccaagcttcttaatgaacatcaaaggcaataaaacatccgttgtcaaaaacagcatccttgagcaaggacagctgacagtcaactaataacagcaaaaagaaaatgccgatacttcattggcattttcttttatttctcaacaagatggtgaattcaactatggcacgaaaatggcccattgcaatattgatctttctgggtgcgttcctgtttgtcggattactgccggacaaaaaccacaattcctctgaaacaaacacggcacctaaggcggattatcgggcggcgtatcattttacgactccggacaaatggaaaaacgaccctcaaaaaccgatttttttcgagggaaaatatcattactactatctttataatcgggactatccgaacggcaacggcacagaatggcggcatgccgtatcagaggacttggtgcactggacggatgaaggcacggctattccgaaatacaccaacccaaacggcgatatatggtccggttctgtcgtcattgataagcacaacacggcaggcttcggcgaaaacgcactggtcgccattacaacgcagccgactgccaaaacacaagcacaggaacaatatttatggtacagcacggataaaggaaaaacgttcacatcctatagtgatcagcccgtgatgaaaaacccgggcactaaggatttccgggacccgaaagtgatttgggatgagcaggatgacaaatgggtgatggccatggccgagggcgaaaaaatcggtttttatgaatcatccgatttaaagaattggcattacacgggcagttttatcacgcaggagatcggcctcgtcgaatgccctgacctttatacgatgcgtgcagatgatggaacgaccaagtggattctcggcgcaagcgcaaacggcaaaccccagggcaaaccgaatacgtacgcttactggaccggaaactttgacgggaaagaatttactgccgatcaagcagaaccgcaatggctcgattacggctttgactggtacggcggcgtcacatttgaagacggcaacagcaaagatccgctgacaaaacgctatgcgctggcatggatgaacaattgggattatcctgatgaaacaccgacaataaagaacggctttaacggcacggattctatcgttcgtgaaatccgcctgcagcagcaggacggcggcacatacagcctggtgtcagagccggttgaagcattgaaccaattaacctctttaactgacagcattgaagacaaacaggtgaacgggtctgagacactgccgatcaagggtgatacgtatcagcttgatatggatatcgcttggtctgatatcaaaaatgcaggcgtcagactcagagaatcagcagaccaaaagcggcatattgatgtcggtatttcagcagaagacggctatgcctatgtgaacagatcgtttacagaccagcctgataaaaccggaacatatgccgaaagcaaagcgccatttgacggaaacaagggccgcgtccatctgaaaattctcgtggataaaacaagtattgaagtatttgcagacgacggaaaaaccgttctgaccaatgaagtgttcccaaaagccgaagatcagggcattacgctcttttctgaaggcggttccgctgactttcagcatattgagatgaagcatctcggttcgattcattcttaggctccctcttcatttcttatcagcgtccggactgtgttaaaatgcagatatgtatactacgattcatgaggtgttccattggataatcaaaacaaagaacctgtgctgaaaagaaccatcatgcgggacgaagtgtatcacacgctcagaaactggatcataacgggcaagctcaaaccggaaacaaagttaaaggacaaggaattgtcagaaacattaggaatcagccgcaccccgatacgggaagcgttattgcgattggaagatgacggcttggtaataacaaaggcaaacagatggacgcttgtcgctccgattgaggtaaaagaagcggaaaacttatattccattgtctggacgcttgaaaaactcgcaatgcagcaagccctccctcatatggacgctgcagtgattcaggaattaaaacagcttaatgaggatctgcttcaaacgatgaaagacggcgataaaatggccattctggaagcggataatgcatttcatcatcgcatcattctgcttgcggacaacgctgagcttcacaaattgcttgtcagcctgaaagtaaaaattcagagaatggaaatccgctatttcagtgaaaacgacgcgttaaacagatcatataacgaacactcagatatcattcacgcattagaacagcaggatgacggcgctgccctggcagcgcttgaagcgaattggaaaaacagtttagaacgcctgcaggacatgtaatagcgaaacgaaaaagccaaatcatatgatttggctttttttacaaggcagccgcgctggctgtcttgtttactttttgttgtttatatataaatacataccgtaatcggtcggcacagaagcataccccatctgtctgagcatggctgttatattcccgcgatgatacgttccgtggttcacaacatggagaaccatatcggccgccgcggttttcatgatgtcacctgacggatgctctatttcaaggggaaggctgatattttcttccttttgcaaaaatagttgatattggtctgataattccaaaaacatatcttccagctcttctatctctttagataagatttcctctttttgctgatcagctgatttcagcgtatcctccagacgcactccggagaacacatcaaaccatcccttatccgacagatacacatgagtcaatacaccggctatcgacggaaagacactttgaatctccttacggtacacatcctccggaagctctttaagccgggtgaatatttgctgatttgcccaaagatgataatcatacaattgcagtacaggatgttccacaaaaccctctcctctcttggtacagaacgtacgttcctaattataccacgctacatacggctttgtaccgttttcttcatttgaagctgcgaaaatccgataataaccgataataataaaagaagacccgcgccgacataaataaaccgcacgccgaatacatccgagataacccccgttccgataatggaaaacataaagataaactgaactaaagctgatctcgccgctaatatattgactcgtgtctgttcggtcgttatgttttgaagaaatgtttcctgtgtcagatcccttaatacacaagcgggccccatgcatagcaccagaaagagggccagaacggcgctgctgatcagtccataaataaaagtgaacattccatatgccagggctcccgtcagcataaacggaatgaggttgcgctcaaatttaccggataacctatatatgatcaatccgcccagcatcgtcccggcataatagactccgttcacgtatccccaccacgcttctcctttatgaagtacatcatgcacatacgttaaggacacagacccgatccatatcatgcccgcccacgattcgatcacgtccatcacaatgaggattctcagctgtttttgccgaaataaatacacccagccgcttgccgcacttgcaaaaagtgaacgtctcctgactgcttccggcggagcgcacatgtgcacttgaagaaacagaatgatgcccaacaccgaagaaaccagtaacatgacagtgatgataatcgtatagctttctcccaaaaacgcgatgatgacgccgcccaaagaccagcccgcaaactgaacggtctgatccgccgcagataataagccgttcgcttttaccctttgatcaggaggaatgatttctccgatcagcgcgctttttaccggagcgaaccatccgttgcaaaaagaaatccctccgatcagacaaaatagcagaaaaaagaaagcggatgaaccggtttggatgacataaaacaaacagactaacagtatcacctgtatcaattgagaaccaatcagcaaagaccgaagcgtgaaccggccggtaaccagcggcaaaacggcgctgcccaatacgcgaaatacaatgctgacgaacgtcataagagaggccatcgccgtcgagccggtttttgtaaacaaaaacaagatgacagccatcgtataaagggagaaccccaagttgacagcggtctggctgtataaaatagagtaatacgctctcctcatattcatcctctgcaaaacccccgctccctgattatgtaaatcataccataaccgctgatcagcaatcttataaaaacacagattgacatggagtccgctccatctattaagcttttacgagcagaaagatcccctgccgcaaaaacaagccgatgctttcgcgcatcggctttcaaattaacccaaaaatcatctcaagacacaaaagaactttccattttttactgttatgtaaggcgaaacggagaaaccaagtccgctcatcactgtctgcttaattgcttctatgctccacagttccaatgtttgtaaatggcgatacgctcctccaataaagaatgatgaaaagggcttccttcccggaagccctcactccgtctgcttacgccaataaaagaaaaataagcgctaaaacagccggaagtccttgtttcacgataattgatttgtttgaagtaaagcctccgaaaatggccgctatgaccacacaaatgacgaaaaacatttgaatcatatgaccaaccggatcagctccgaggatcagcccccaaatgaggccggcagccagaaatccattatacagaccttgatttgcaaacatgaccgctacattccgatcaccttctaaatgcttcggcaaattgaaagaccgcttggcagccttcgaattgataaaaaacatttcaagtatcatgataaatacatgttctaaggctacaattccgactaaaacagctgcaataatgtccactgtctctctcctctcagctttacttcaaaattatttccattgtgcgatcgtttcgatagggagacggtaggaagcatatccttcgtccgccgcttttccgattgacaaaagcataaccggtacataacggtctttttccagtccgaaaacgtcggcaatcttttctttgtcgtagccgccgatcgggtttgtgtcatagccgtgcgcgcgggccgtaagcatcagctgcatggaaacgaggcctccgtcaatcagaatggtttcacggttcacttgctccggcagtttttcaaaatgtgccgtcaaagcagcgatttgtctgtcttttacttcctgcggcatatagcccagttcgaccgcttttgaataaatttcttctaaatattcatcattcttcatatctgcaaaaaccgcgataaccgcagaagatgtgctgacttgtgtttggttaaagcttgcaagcggtgcgagtttttcttttccttccgggctgtcaattacgagaaaacgccatggctgcgcgttgactgaagacggcgctgtcgttgcttcttccaggatctgagtcatttcttctttgctgatttttacggccggatcataattccgaatagaacggcggcctttcataatgtccataaaatcgtttgttttcagttctgttttcatgtgtaaacactcctatgctttcatattctctatatttttttgcagctgtgataatacgttttttagcatactgcgttcttccgcgctgacgccggcaagcatttcttttatgaaacgctccttctcttttttggaagtctcaattctctcccgcccctgttcagtaagcctgacaagtatgattcggttgtcctcgggcttccgtcttcttgtgaccatttctttggcttcaagctgtttcaagtgtcttgtaacggctgcgccatcaatattcacctttttctgaagatcgctttggctgatctcatcaacgtgaaagagcacggcgagaagctcaaggcgggattggctgattccggtgcacgcttcaaattttgctccgatcactttatgcagtgattgaagctgatataaaatctcgccttcctgtgaacaacatgttgtcaaaacccatccccactttcttatgcacaattaattgactagtcaatgtttgatacatcaataatatacaaccgccactctttttttgcaagttttttctcctttttttaaaaaaagctgccggttaacggcagctcttaatgattatgaacttttctgaaattactgccttttacttcagccacatcatagaccgtcacaaaggcttgcttatcaatgtcattaataatttccttcagtttggtttcttccaaacggttgatgacacatgtgatttctttgaatttttcatgagaaaaaccgccgtatgcttctttgtaagtagcgctgcggcccaattcctcacgaattgtctctaccattaatgcaggctcgttggtgataatctgaaatgttttagaaccgcttaaaccttcctcaaccacatgaataaccttagacgcaatgtagtaagcaatgacggaaagcaaagcgccttgcagcccgaacacaaatgaaacgaaaataaacacaaaaatgtttaaaaataaaatgaggtcgctcgtgccgaatggcaatttccgtgacagcagcacggccagcatatcaataccatctaaagcgccgccgttgcgcaatgccaatcccattcccagaccaagaataatcccgccgacaacggtgattaatagggtgtctccctcgatgattgccggagtgtggtggaaaaaaaccgtgcccgcggcaagtgaagcaataccgataattgacagaaacgcaaagtttttcccgatttgcttatatcctaaccagacaaacggtatgttgatcgccgcaattaagatcccaagaggcagatgaaacagctgtgaaccgacaatgctgagtccggtcaccccgccgtcagatacgctattcggaatcaatacggtttccagcccgtaagccgctataattccgccgataatgaccataatagcccgtacgatagattttgctctggatttcttacgtttttgtttttcgattgtactcatctcattccccgcttcaattattttgtcttatttaaatataccataattgatacttttcgttaaaaaaacaagcctgtcagacgattttgaagcaggaaccaaaaaaggtgattttacagataacatatccatttatgatttttatcattcagaataaaaaacagtaaaaggaattaaaatccattaatattctcttttgtttcccttcttcacatactcccaatcatgttctatattttttctcacccgctgaaggaggctgaaaatggtttctttttcctcaggcgtaaagccggacaaggctacttccgcagagtgctccccttctctttgcaataacgggtaaacctttctccctttttcagtcgggaacagtttttttatttttttattttgatcatcaggacgcttttcaataaacccttgtatttccagtttctttatcgctctcgccgctgttgttcggtcaactttaatcatttccgccaatttctcttgtattatccccgggttttcacatattcgcacaagatagaggtactgccctttggttaagtctaattctttaaattcaatattgctgatggaatccaatgcccgtgcgatcatgccgatttcccgcaaaatatcagtcatatcttttcaaacccttcgtattttcattgcatttgcaataaaaatgttttatcgttacttctataagaccacaagcaagccgtgcagtccagactaatatgtgaaaaggattgattgatcatgaagataaaaagaatcacaacggaaaatgatttacaagcagctcttgatattagaaaaacggtattcatcgaggaacagcaagtacctgaatctgatgaatttgatcagttcgatacgcttcaggaacagtgccgccatatcttggtttttcatgaaaatcagcctgtcggcacaggacgcgtccgcatcgtaaaccacacaggtaagctcgaacgaatctgcatcctgaagccttaccgcaaatacggattaggcaaagtgatgatacgcgaattagaaaacatcgtgaaagaaaaaggcatcactcaatgtaaactgcatggacaaacacatgcggaaggcttttatcaaaaactgggctatcagacaagttcaccggaatttatggaagacggcatcccgcatgtcttaatgacaaaagagttggcttcgcctaatgacagtgaaacgtccggatcccttcttttttgatctttttaaaaaacgaatcagaaagaagacgcttcagcacgcccacaaccctgtgaaccggtagaagcctttgaaaaacgcgaaaacaagccggttcttgtcagcatcggctattcgacttgcttgtcagatacccactctagagtcagcaggattcataaagaagggagagagtcccttctccatcccgattttgtctagtcccaaattaaaggcctatccacttcagcagttctgagatagtctaaaagttgaccagtatgtactgattcatgataagcgattcttaacaacatgtcccctagttcccgaacatatccaacatcagacctgtcaatctttatatttgttaaatctgtttcgtttaaagatttgatgaatgtcaaaaactcagcccgaaacggttttgcaaactctaattcttcggctactgtggtaaaagtttttgattcataaggattaatagattcctctgaaggctcattcatttgttttagcaaaattttatgataaagaaattctgcttctaaaacatgtcttatcatttccttacacgacattgcttcggaatccgggcgccaatccatagtttccttaggtatacctgtccataacttgacgcttcgccgtctcacttcttcaaaatttaaaacaataagatcaatagtattcaagtatttttcccccttttattttaaaaacaaattctccttttttcctgaaaaacctccatgagctgcttcttaaaagatctcaattggagattttctgcccggataccaatagagagatcataaaattattatagaaagtcaccttacttcaaaagtatatatttatctgattgccaattctttaataatcaaactcaattcataaattcccttttgaaggtcttcaagagatgcataagcatatgataagcgaacaaaattccctttctcctgagcatagatactgccgagattgagaagtatcccttttgttaaagcttttgtataaagtaatttcatagatattgaaggcaatatttttacccagacaaagaatcctcccttcggaatattccatgtagccacattcttcaaattggtttctaaagcactcatgaccaattgccttctcacctttaattcacttctaacctgttctagatgccgctggtattcaccggatgtaaaccactctgccgctaccctttgagataatgaactggatccgtaatctgtctgcattttaatatcagataaacgttcaattaccggttccggccccgctatccatccaattcttaatccggggcttaatgtcttagataaacttcctatgtaaagcacatgcccatttttatctattgttttaataggatctggaggaatttcatctatccataactcacgataaatgtcatcttcaataattggaagctgtgcattctcacttgccgcaaggatttcttctcgcctcttttttgacattaaaatacctgtaggattatgaaaacagggatttgtatataatatggctcttccccgttcttcctttgtcatatgaatatggtttggcagaagcccctctttatccatagggagcccggtaagattcatcccggctgactgaaatacatgcagcgaataaagataagagggctgatcaagaaaaacggtagatcctctttgcaaaagccccattgatataagctgtaaggcttgcagcgctccagaaacaataagtatagaagaaggtgaagcacgaattccgaatgtttttaaataatgactcaatgcctctcttaaaggtagatatccttttggttcctcatatccgaatgcctctatgttttgtgatacctttcccataatctctttcatagcagctaaaggaaaaatctcgtttgaaagctctcctttgctgagctgtataagatcagggtttgattccgatttattgatctcttggacgattcttctgcttggctgctgaattccggaggttacatattgatcccaatcgggggcggaattcttagccaaaagtgtccatgtattgttaataacaactgtgcctttacccattctgccttcgatcaatccatccgccatcaattcctctaaagctgtaattaccgtgcttctgtttacttcaaagtatttagcgagcgtgcgctggcttgggatcttacttccaatcggccattctccatttccaattttctcttttatataatcaatgatttgtaagtattttggcagttttctaaccgtttttccttctgtaaagctcataaaaagcaatctccttcattataagtggttgggtcaacacttgattaactggttgaagccattttactaattctctattagtataaaacacattaagagactggttggtttttataagagaaggagtgaaaattttgaataagaaaacggttcgaatctgtatatcttacagtctgatgattgggttgtgggcatcagctttcccgggaatccgcgcgggtttggagagttacacgccggaacacctcgctttgtttcgcttattgattgggtcgatggcactgttgctttttgctgttttgactcaaatgcgtttacctgacatgaaggatatccctgctattttatctttaggagttttaggtttcgcactgtatcacattttgctgaatatcggagaaaaaacagttagcgcagggatagcaagcttactcgtaaccacggcaccgattttttctgcagtgttatcccggcttttttgcggtgaacattttggatcttctaaatgggtcggatctatcattagcttattgggtgtagcatgtatttcatttgggacagcagactatactcattcaatgaaaggcatgttattcattctgctggctgctttttcagagagtatctattttgtctttcaatcccgctatataaaaaaatatggttttattccatttgtgacattcaccatttggggtgcaacattgccaatgctggtgtttcttccggggttatggggagaagttattcacgcatcgatgaattccacattgtctgccatttacttaggtttattaccaacagttatcccatactttgcacttgcatacgtcacttcactcgtcggcgcttcagaagcagccatttcactttatttaacaccagctatagctttggtcatttcttggttgtggttaggtgaaatacctgcctttatttctcttctgggcggagcagttacagtctgcggggtatgcttcacctatctggaagcaagtaaaatcaggcttaaatgaatctttttagagaattgggtatgttaaacgtacaattaaaagaaagaaggtgatcccatgcccgctaacaataaacccaacagtttaatcacggagaagtctccttacttactccaacacgcccacaacccagtggactggttcccatggggagaagaagcctttgaaaaagcaaaacgcgaaaacaagccgatactagtcagcatcggctattcgacttgtcactggtgggatgtctgttaagatacccaaatatgtcgttgaaataaaataaattgtaagagatatttacaacttaaaatgaaaaataaaaaagtagattgattaaaaatcgacttttcgcattaaaatattaaatcttttaatgaggcttagttgcaatcttggagctgacctctgagttactggagtttaaattaattacatcttcaattggaataatctcgcttggggaaacaccatgaagggtagcacctttaactgcaactcctatgacttcattactttcatttattataggtccgccactgtttcctccgtatatgattgccgatatttcccgtcgtgaatggaacgttccggttgaatctctatgttttctaataccttttaggtggccagtttcgatttttatttcttgccctattttgtagtctggataccctattaattcaattttctgcccatctttcatgtcaatgttatattcatatccttgattgtctatattaaaaccttttatatctaaaattgcaatatctttatctaggtcatatttggatactttcgctttatattttaaatcaggataattacctctaaaaaatgagataccatactcattgttaaattttttattgtccttaatagcttctattgcatcttctataacgtgagcattagtgattaagccaactccctttaataaaaagcccgttccttgaccgtataatatttcctccattttatcgttttcaaaacaaactaaaggaactttatcatcataatcaattatatatgtataagtttcatgaaatttctttaaagattctaatttaaaaggagatatagtttcactaagataagatattttattaaatctctttgctaatttcaaatataaagggtcatcttttccttttacatgcccaacatgtgaaatcataccttttaaaatagcaaacatattaatattatcaagatatttcttttgacgaaatgggtatttttcttcgaaaatttgttctgctttctgtaaatcttcaacgtttttttcaatacagtgaagaattgaccttattcttcttacatagcttcttttaacatttaatttttcatttaccgtaattcccgttacagtttgattttgtctataattctgaagtcttgtcttttctttattaatcttaaacccctgatattccacaatactaattacattactattcagaaaaatagacccctcttttatatatgcaatatcatgagggaaaaccctcctgcttgtagaaaacgttatatcgtcagcatacctagtatattgacatctgttgtttttggccaatttagaaaactctttatctattctattacatataatatttgatatgataggggatgttgctgctccctgtggcagaaaaccattcggatgacaacatatatttgctaaggttgtagcaactttttcattaaatttataatatgtcataaacattgatctaactcttctaaaggttatactttcgaaaaaattctctatatcaaaatttagtacatattttttatttaaatgcttttgagcattatcaactattcctcttccttttacaaaaccatatgattgcctatggtttttatagttagactccaaaatataagctagctttttttgcagaatagataaacttaaagtaggcgaaaaaataacacgttctgaaccatttttcttttttaatttaaacgccttataattagctcctttattttttataagtactttccacaataattcttttggtacctctaaaaggagagctacatcttcaaaacaagataaattcttgaaattttgtttaatatcctctagattgctctgtaattcaaaatttaacttataaaccatagcaatcccctcctatttacaacagcaagggttaaaattctacccttctcctaatagcgattagacaaatcgaataaaacttcgaagataaaataagcgtgtaaattaagtataccctttaaataacagacggcgatttcaccgccataaagtcaattttttcttacccttgctgtcagtgtaaattatactatatatattcatcaatattaacagcatttttgaaaagtttatatttaatcgcgatgttttacattatcttacctactgtaagtatttatgataatgaaatgtggtaagctaacaacataattattaacgaaaaaagaggtacttatatgcctactcacaaacataccaacatgttaatcacagagaagtctccttacttactccaacacgcccataacccagtggactggttcccatggggagatgaagcctttgaaaaagcaaaacgcgaaaacaagccggttcttatcagcatcggctattcgacttgtcattggtgccacgtaatggctcacgaatcctttgaagacgaagaaatcgccggtatgttaaatgataaatttatagccatcaaggttgatcgtgaggagcggcctgatgtggattccgtgtatatgagaatttgccaattgatgacggggcagggcgggtggccgctgaatgtgttcgtcacacctgatcagaagccgttttatgcggggacgtattttccgaagacgagcaaatttaaccgcccgggttttatcgatgtgcttgaacatctgtccgaaacgtttgcgaatgatcggcagcatgtcgaggatatcgcggaaaacgccgccgctcatcttgaagtcaaagttcatccgaccgagggcatgcttggcgaacaagcggtacatgacacgtatcgtcagctggcaggcgggtttgatacggtgtacggcgggttcggccaggctccgaaatttccaatgccgcatatgctcctgtttctgcttcgctactacagctatacgggcaaggaacaggcattggccggcgtaaccaagacactcgacggcatggcgaacggcggtatttttgaccacatcgggttcggatttgcccgatactcgactgataatgaatggctcgtgccgcattttgagaaaatgctgtatgacaacgcccttctcctcagcgcttatacagaagcctatcaagtcacgaacaatgagcgctacaaacagattgcgacgcagatcgtgacgtttattcagcgggaaatgatgcatgaagacggcagctttttctcagcattagacgccgatacagaaggccgcgaggggaaatattacatatggtctaaaaaagaaatcatgaatctgctcggggaccaactcggctcactttattgcaaggtgtataacatcacagaacaaggcaatttcgaaggagaaaacattccgaacctcattttcacgcggcgtgaggccatccttgaagagaccggtcttactgaacacgagctgaccgaacgccttgaaggcgcacggaaaaaattgctggaagcgcgggaaaacagaagctatccgcacacagatgacaaggtgctgacctcatggaacgcgctcatgattgccggactggcaaaagccgcaaaggtatttcacgagccgggctttctcagcatggcggaaacagcgatccgttttctcgaacggcatctcataccggacgggcgcgtcatggtccgctatcgtgagggcgaagtaaaaaacaaagggtttatcgatgactacgcttttctgatctgggcttaccttgaactgtatgaggcaggttttaacccgtcttatttgaagaaagcgaaaacgttatgtacaagcatgctggatctgttctgggatgaacggcacggaggatttttctttaccgggaatgatgccgagacccttcttgtgagagaaaaagaagtctacgacggtgccgtcccttccggaaacagcgcggcagccgttcagctgcttcgtctcggccgcctgacgggtgatgtatcgctgattgaaaaagccgaagccatgttttccgtttttaaacgggaaatagaggcctatccgagcagcagcgctttcttcatgcaaagcgtactggcgcacataatgcctcaaaaagaaatcgtcgttttcggtagcaaagatgacccggacagaaagtggttcattgaagcgcttcaggagcatttcactcccgcctatacaattctcgccgcggaaaatccggaagagcttgcaggcatttctgattttgccgcgggttatgaaatgattgacggaaaaacgacggtttacatttgtgagaatttcacctgccgcagacccaccacggatattgatgaagcgatgaatgtattacaaatcagcagcagagcctaggcggcctgctgcttttcttttttcacaaaacggaatgcgagccatgcgaagatcatattgatcaccagactcgatatgcaatcatatatttcatagccgccggctgatgaaaatatcgatggaatggcgccgtaaaccgaatgatcctcggtgagaaagataaataaaaacatattattggcagcgtgaccgcccagggacagctccagactgcccgttttaatcgtgataaaggtccagatcacaccaatggtgacatatccgattcccgcccagagagccccattttccatctccggatttccgaagtgaaggacgccgaataatccgccgatgatggcagtcagaaccaccgcgtttgccgtcaatttcccggcgaactgaagcagaaaaccccgaaagagaaattcctccgcagaggtttgaatcggcaccaaaaagacggccgccgctaacagcagcagaaagcgcgaagcatggaattcctgaagcgagaatcgatccgggtggaataaaaaatcaaccagccccgcaataaacatcagcaaaatataagtgccgaatccaaagaaaatcctcttccagttcagcgactgattcggtgtgataatagataaaaaccgccgtttcataatgaaacgaaccgctatccaaatgcctggaatcgctatgaagtagacgatatgctgtaaataaatatccgccagcgggtcacctaatgccaactcatcccagtttatcgtcaatgacggattgaactcggatatgagaagcatataaaatacggtcaatatgcttccgaataagaacaaacccactatgaccagcagagaaagaagatatctccatacactattttttccctctgcgggccgtacaaaagtattcatatttatgcatcagcttcctttccttcaacattttacaatagaaacagaaacagatataggaaatttcatatatttttaagaagaaagcgctatgccgtttccttcggctctggttatttacactctgtttttgccaaaaaaagacctttataatgtatttgtcagattaatttacagtattttctgattacaattgccaagtcagggggttttttatgaaacatcagacattctcaaatgtagcgaaccgtttagaccgtctccccatttcacgtgtgcactatcaagtattaaccgctctcggaatcatctatttttttgatctcgctgatctgtttacgctcagtaatgtggctccggcgctgattgagcattggggtgtagagctgtccaccattgctgacattacggctgcatccttcttgggcatgtttttaggcgcctctctcggcggaaggctgtccgatcggatcggcaggaaaaaagcgctgaattgttttgtccttatcttttcgatctcatcttttctgaatgcgctggcatgggacattccttccttaatgattttcagatttttgacgggtctcggcgtcgcagccgccatgattgtgacgaacagctacttggcggagttctttccatcctccgtacggggaaaatatatctccttttgcgccatgatcggattaatcggcgttcccgtcacaaacgtcgtatccgcttttgtcattcctttaggctcatggggatggcggctcgtctttgtatggggcgcggccggtctcatttatttcttttttatccgccggcttgaggaatcgccgcgctggcacgaaaatcgcggtgcatataaccaggcaaacgccattatgaatcggcttgaaacccgtgtagaaaaagaaaaaggcccgctccccgcaccgaaagaagcagcagaagtacatgccgtgaagcacgccggctacttaggactgtttcagggcaggaatctaaaaatcaccatcatcctgtcagcggtatggatccttgaaacctttggcttttacggctttgcctcatgggtgccaagcctgctgaaaagcaacggcatcaccatggaaaaaacgctgtggtacaatgtgctgcactctgtcggggccccgcttggcgcattgctcggatccatgatatccgaaaggttccaaaggaaatggattctggccgcaagcgcttttctgactgcagtcgccgggctgctgtacggcatgacgtttattcccgtcatgattattgtgtttggatttgtcgtcaacgtcacagaacggatattcacctcaaatctatacgcatacacatcagagccgtatcctacggaatatcgctcggcagggagcgggctggcgtacgggctcggccgtttttccaacatattcggctctttgctcgtcggatttattgccataaagctcggctacatcagcgtctttttgtttatcggcggctgctggctcctatgttccgttctgttaatcctcttcggcccgaaaacaaatgcacagcaaatttaaacaataaaacagtgcggactcactccgcactgttacactgtgatttctatcaaattgccttcccaatcctctatcacgctctcataatatccgtcacccgtcacgcgcgggccgcttacaacctgaaatccgtcgtttttaaacgtctccgtcagttcattcacccgctccttgctgcctgtagaaaatgcgagatgcgcccacccggtcatattctgtgacggcgtttcctcaatgccgccttttttcataatttccagccggcatccggagtcaaatgaaagaaaatacgatttgaaatcctttttctcattatgataaaggtcattggcttttgcgccaaagtatttctcataaaactctttcattcgttctaaatctttcacccatatcgctgcatgttcaattttcatatgtccgcctccttttttttctcaatctatttataagccatgaaatccatttcagctcaagtctttttccgctgaaattggtgcataatttgttttttagccgtttctccgttcaaaaacagcaaaaacgcttcctttccgacccgttccaaatgaagttccaaggaaggaatattcaaagcccggctgacgctcacatttccctcgccgatgatctccacgtcccatttctgttctttcgcaaactggtacaagccggcagccacatcatcactgtgtgcataaatagccgtcggcggcttgctgaaaccccggaagtgctcaccagcacgctttccgtcgtccatatcgtggcatccgattagaatgcgggtttcatcaaaagaaccgaaaactgctttataggcgtttaccttatcggtcgtacttgggctttttgccgcttcccgcacacatgtaaaagcaacgtctcgatgcccgcggtttttcaaatacaaaaagctctctctgtatgccgcctgtctgtcattataagcgcagggaatcgcttggtgctgtgtatattcacaggcgacaatggggccgtattcaaggtaaggcacggctgtttcccattcattcgcgcgggaggtgacaatcagtccgtcaatctttttcattttcaacagttcgaaatatgtaatctctatagcggggtcatagttggtggggagaagagttgtcacgtaatcatgggcaaacgcttccttcgtgataccgtttacaattttgtcaaagcagggatgatcactgtacggcaatatcacgccgatcgtattggtctttccgcgaatcagatcaatggcggttcgattaggcgtataatccagctccttcatcacttgattcacaagacgccttttctcctcagatacgtacggatggttgtttagcacgcgtgatacggtagccaccgacacattcgccagtttcgcaatctcttttatatttgccatgtgctcctccattttcggtaataaaaaagcagcaagagtgaatttctcttactgctatctcatcataaatccagtgtcatttcaacagggcaatggtccgaacccatgatatcggcacaaatggccgcctgggtgatccgctgcttcagcctgtctgaaacaataacataatcaagccgccagccgatatttttctcgcgtgcattcgtcctgtaagaccaccaggaatacgcgccttcctgatcgggatataaatagcggaatgagtcggtaaatccggcattcagcagtacgctgaacgcttcccgctcctgatccgagaaacctgcgttctttcggttggcttttgggttcttcaagtctatctccctgtgcgcaacattcaaatcgccgcataatatcacaggcttcttctgatcaagcttttgcagataatccttaaaatccgcttcccactgaagacggtaatcaattcgctctaacccgcgtttggcatttggcgtgtaacagttgacgacgaacacattctcaaactcaagcgtgatcacccgtccttcttgatcatggtcgtcaattcccaatccataagaaacttgcagcggctttactttcgaaaaaacagccgtccctgagtagccttttttcactgcatagttccaatagtcatggtatccttcaggctgcaatgatacttgtccgtcctgtacttttgtttcttgcagacaaagaatatcggctttcgtttcctgcaggcaagtattgatatctatctttttcatcacggcacgcaagccgtttacattccaagaaatcagtttcatgtgttccctcccgcccggctcagccggtattaacaatcttacttcagtgtttcaatgtttctgccctctaatgccagcagctgctttttcatttctaaaccgcctctgaatccggtcagtttgccgtttttcccgatgacacgatgacatggaaccgtaatcaacaccggatttgccccgattgcggcgcccacggctcttacggctgtcggtttctgaatcatttctgcaatatccgaatagaagtatgtctcaccgtacggtatgtccatcagcgcttgccatacagccagctgaaattctgttccgtaaagatccagcggcactgaaaatgctgatctgccgttttcgatgtactcggacagctctgccgtgtaaggcgccagtttttcatcatcacgcaccaagcggtgttgcggcattgcttttcctgtccaccgctcaagctcttcaaagtttccatgattcgaacctataaagcaaagccccgtagaagtggcggctgtatacagactccactcattccgtgtgaagagtgtccaataaaccatagtctctttactcatagtgaatctctccccgtccctttccggcagtttttctgtatgctgtaggcgaacttcccgttctctttttaaaaagagtcgcgaaatgtgctgtgtttggaattccgacagtcagagcgatctccataactgtcttatcagtatagagtaaaaggtgttccgccttcgtcagtctttttatctgaatatactcaatgggagacagccccctgatttttttaaatgtccgctgcaaatgataggggctgccgtgacacatatcggccagcacgctcagagtcagtgattcgtgatagtggctgtcaatatactcggtgatttgcgcaatccattcttcatcaggaagacgcagaccgttgggacggcaccttttacagggacgaaaatttctctccagcgctgcatcagccgtatcaaataccagcacgtttttcttattcggaactctcgacttacaagaaggccggcagaaaatccccgtcgtttttacggcataataaaatgtcccatcataggaagcatcattgtgaatgattgcattccacttttcatctgtcaggatatttctttccgttttcatctcagccaccccctgtttctcagtataaacaaatccattacataagtacgcttatttgaatagaggagcaagataacaaagataagactcagaagcatttctatgtttcatgtggaacatttcggcagggggttgagtgatataaaaaaagagcaggagcccgcgggctcttgctcttttctttcggcttactcgccagttacgtatggaagtaaagccatttgacgtgcgcgtttgatcgcgatagtcaatttacgttggtatttcgcgtttgttccagttacacggcgaggtaagattttaccacgctcagaaacaaactttctaagaagatctacatctttgtaatcgatgtgcgtaatgccgttagaagtgaagtaacaaaccttacggcgtttcgcacgaccgcctctgcgtcctcctgccattgtcatttcccacctttcttgttatgaatatagcgataatctattagaacggaagatcatcatccgagatgtcaatcggcttgccgtcgttggcaaatggatcatcattaaagctgttcccttgatttcttctctggttgttctgatttccgccgaacggattatcattttggcctccgccaaagtattggcctccgccgctgtttccttcgttgtatccgcctgaaccagaaccgccgctgtttttaggctcaagaaattgaacactttcagcttggacttctgtcacgaagacacgctgtccctgctgattttcataatttcttgtctgaagacggccgtctacgccggcaaggcttccttttttaagaaagtttgcaacgttttcggcttgttttctccaagtgacacaattaatgaaatcggcttcacgttctccagactggttcgtgaatgtacgattcacagctagagtaaacgtggcgacagccgcaccgcttggcgtataacgaagctctgggtcttttgttagtcttccgactaatacaactcggttaagcatatgaaagaccaccttttaacattatatatttcaaattgcttattcttcttctttaacaacgatgtggcgaatgatatcgtcactgatcttagctaaacggtcgaattcagaaaccgctgcagcgtcagactgaacgtttaagatttggtagaaaccgtcacggaaatcgttgatttcgtaagcaagacgacgtttaccccaatcttttgttccagtgatctccgctccgttagaagtcaaaacgttgttgaaacgctcgataactgccttctttgactcttcgtcaatgttcggacggataatgtacataacttcgtactttttcatctgtttgcacctccttttggtctaagcggccctataatgggcaaggagcaataattctattactcacaagtttatattataccaaagctcttgtccctttacaactgtgtcctatacattaaatcggaaatgaatgacatctccgtcttggactacatattccttaccttccagacgcacttttccggcttctttcgctccggacattccgccgcctgccaaaaggtcttcataagcaaccgtttcagcgcggataaagccgcgttcaaagtctgtgtggatgatacccgcacactcaggagctttcatgccttttctgaatgtccaagcgcgcacttcctgttcccccgccgtaaagtatgtcgcaaggccgagaagagagtatgacgctttaatcagctgatcaagacctgattcttcgatgccgagctcttcaaggaacatttgcttttcttcgccttccaattcagcaatttcagactcgatttttgcacagacgacgataacctcggcattttcccccgcggcgtactcacggattttcgcaacgtattcatttcctgaaggatcagccacttcgtcctcgctcacatttgccacataaagcacaggttttgacgtaagcaaatgaagctgcttcacaagcttttgctgttcttccgtaaattcaacggaacgggcaggcttttcttgttcgaaagcttcttttaatttagacagaatgtcaaactcaaaaaccgcttctttgtctttttgcttcgcaagcttgcttacccgcgtgatgcgcttttcgactgtctccatgtcggcaagaatcaattcaagattgatcgtttcaatatcatcaatcggatcgactttccctgacacgtgcgtaatattgtcatcagcaaatgcgcgtacaacgtggcagatcgcatctacctgacggatatgagaaagaaacttatttccgagtccttcacctttagatgcgccttttacgatccccgcgatatcagtgaattcaaacgcagtcggcaccgtttttttcgggtttaccaattcagtcagcttttgcagacgttcatcaggcacttccacgattcccacgttagggtcaattgtacagaacgggtagttggctgattcggcaccagcctgggtaattgcattaaacaacgtcgattttccgacattcggcaaaccgacaattccagcagttaaagccattctttcatctcctctatatcaaaccatcatcgtataaacgtattgtaaacctagagcaattataaggaggttcataggaaaagacaagctgagaaaaaagcatttcccgcactctctctccttagattatccttttttaaccgctaccagacagtcaaaaagcgtacttcccattccattatcggaatttgaatcctttgtgagcatgttgacggagcctccgaatgccgaccacatgccttcatctatattcaccgtcttggggtgagcctgcttcatgattttcaccctgccgcgcagacgcccgcggtcattgtatacctctgccgtatctccgtcctgaagggcaagctcctcggcgatatcaggcgacagatccacctgaatctgctgaagtttttcaataaacggcacgtgctgtgaatggttagagcgctgcgggtgaatggacagcagcgtatacggatatttctcggccagcccgccgtcgtgataaacagactcctccggcacttccaatcgagggaggccgctgtatcctttctcttctgccaatgacgagatgaattcaaatttcccgctcggggttaaaaattggaaatcatcccacgggacctgtttgaccggaagcggcatatggcctttttcctttaatcgctcaagggtgatcccctcttcctccaaagaagaaagccccatcttcaagaaatcttccgtacgataatcaaacagctctccgaatccgagacgctttgccagctccgtccaaatccatcggtctgatttcgcctccccctgcggttccacaagcttctttccatattgaacatagtgatgatacatgctggagtaataaatatcttcctcttcgaaaacagcggccgtcggcagcacataatcacagagctttgccgtatcggtcatgatcgaatcaatagccactgtaaccggtgttttttcgaacgcttccttcactttttttgtattcggcacttgtgtcagcggattgccgcacgtcacgatgatcatctcaatcggcgggtcggctgcattcaacgcttcttcggcttgagtcatcatcgaaaacgttcttgcgttttttttcagatcaggacgggtgagttcggttttcgcaaagctttcaccgacttgcacatttccaaagtttgcgccgccgcctttaataccgacatttccgctcgccgccgctaaagcgtcaatccagcgtatcgtcccgccgccgtttttatatctctgcatcccaagacccataaaagtagaagcgggaccgtctgcatatagatcagcaagatattcaatctcttctaaagacgtttctgttttctcaatgatctcatcaaaagaaatcgcgcgcagcagcttttctatttcttcaaaaccgactgaatgcttttgaatgaaatcggcatccgttctgccggtttggcataatactttcaaaacaccggccgcaagccagccatccatgccgggtttgacggatatataccggtcggcaagctttgcggtcggattaaaaatagggtcgatgaccgtcagtgtcgccccttttttcttcacctgctgcaaatgatgatagaggtgcatattcgtccgggacacatttctgccccatacgatcacatgcttgctgtgataaatatcaagcggtccatgcccgtaagagcgcccgaaatcccagcgctgcgcttcaattccggaaccccagcaaatacttcccgcaatctccgtcacaccgccgtatccattgaaaaaacgctggtcgagcgccttcaaaagaccgttatttgcgtagtcatgactgtgcagcacagcggcagtgccaaacgtttccttaatcaccgccattttttcagcaatttcatccaacgcctgttcccaggaaatgcggacaaattcgccgtctatctttttcaaaggataacgaagccgttccggagcattcgttttcgtctccagcattctgccccggccgcaaatttttccttctgtaatggggtgattcgggtctccgtctactttcgtcaccttcccatcttcaactgtcaccaaaaagccgcagctgtcccagcaattcagcgggcacgctgactgatgcactttgctcatcgggcctcttcctctcctctatatgaaaaagcatgagcgccagcctttatgatgtaggctcctcatgcttgacgagtacttttttcagctttctctcaaaatctcttctcggaatcatgacactgtgggaacaccccgtacatttgatccgaatatccattcccatccgaatgattttccacctgttttcaccgcaagggtgcggtttcttcatttcaacaatatcattcaggccaaagtctttatccgccaagacccttcacctctcttcatagactgctttatttattgtacaaaaaaagacaggataagagcaacggccgcactcaaaatgagcattatacttttttccatcttcctaatatagggtaaagaagaagacataccagcaaataaagacttaatagcccgtaaatgggatacaaaatggcgattaaatctgaaaagccgattgtcgtaaaaggcaccatcacagctaaaagaagaaagacgagcatccatctcggcaatttcacaaatacaagcatgcggctggacagcccgaacaggccggtcacggttgtcgtatagatggctaaaaaaagtaccgcggccatacaaagaaataacggataaggagcgccttcaaggacggcaaagagaggaatctcgtattgtgtgagactgcctgaaagctgcacaagcgtttcattgtagacaaaagaaatcacaccaaaaataagcccgcttgcaatactggcgattttcgcttccccaagccctttcatatcctttccgacagaagaaagaaccgccacaacagaaaggatgtttaatgacgtaaaggtaatacttgccggccaattaaattgccgggtcaaatctatcgtccacgtgtaatgatgggttgtctgaaaaaagatcaatgcatataaaagcccggctacaagaatcggtatcaaaatactattcaaagataatattccttttatatcccaaaagaataaaaagacggtcacgatgcaaaaaagagaaataccgatccaaaacggcagcttgtacatttgcagcgtcacaccgcctccggcaatcatgaccgtcgtcgttgaaaacaaataaaacataataagtacatcatagattttggcaagagccggccccatcagatgctcaagcacaggtaaaaagtgcgttgattgaacacgatagctgatcttcaacactatataagccgaaatggtgaacatgactgtaaacaatataatagccagtccgctttcaacaccgaaaaactgccatatttcctgcccgcttgcataaccggccccaatctggctgcttaatatgagcagcatccacctcatcccggctctccacacccttatcacctcataaaatttcagataatctccgcatattgctactatattgagtgacagcggcaatcattcatacaaacgggacaaatatggtatgataaaaataattgactaatcagaaaattattttatgaaattattataaggagcccaaactcatgtacatcaggcgtttaaccgcaagtgatactcagccctattccaacatcagactcgaagctttaaaggatcacccggacgctttcgccgtcagccataatgaggagaaagaatggctgcccgaaaaattcaaagccaggatcgaagccgacaatgccatcatgcttggcgcttttgaaaaagacagactgataggaatcattaagatatccaagcagcctctgtataaactaagacacattgcgattatcggttctatgtatgtttctcccgaataccgggggtcaggcgcaggaaaagcgttaatgaccaaagccatcagccaggcaaagaagatgaaagacacggaacagctccatctctcagttacttcaacaaatgaacccggcaaaaaactctgcgctcaatagaattcacctacagaaaaagatcacacggtcttatatctttcatgaacttagagaacaacagctctaagttcttttttctatcccgctcttttcaaacaatcggtatgctgatcactgcataagcataaaaaaaggcggtgctggatatactgtaaacaaccatacatcatcaaaaacatcagtgtaatactcgtatgacatgacaaggaagtgaaccctatgaatcgaaaaggcgggcttttttctcaagaacgggcaaaacaatatgtgtctcatacagattcttctgccgcgaatcaaatacaagcgatccttgcttcatctttacgtaaagcagccggccgaccgttagtcaccgtatgtatcggtacagatcgatcgaccggagattcattaggtccgctcgtaggaacaaagttagaaaacatgaaattaggcaggttgcacgtttacggtacactgtcagatcccgttcacgccgtaaatatgaaagacaaactgaaagatattcaccatatacataaaaatccgtttattattgcggttgacgcttgtttaggccgcgttaaaagcgtagggtcatttcaaatcggcgatgggccgctgaaacccggagctggtgttcaaaaagaccttcctgagatcggtgacgtccatatcaatggaatcgtcaatgtcagcgggtttatggagtattttgttttgcagaatacgaggctccatcttgttatgagcatggcgaatgttttagcagagggattacagctgacagataaaacagaaggccgccaggaacggctcagtccgtttcataagctgacaagacgtatataaaaaaaccatctttttttaaaagatggtttttacgcttctctttcagacaaaagctcaaggatacgttcaaggtcttcatttgagaaaaactcaatctcaattttcccctttttcttttgtctcttaatattgactgttgttccgaagtaattttgcaaatacgattcccgctcttttaacacaacatcttgaacaggttcttttttctttgtttcacgtggaacattactgtttaattgctgaatgagctgctcaagctgacggacgttaagctgttcttcaaccactttcttcacaagcggttcaagcttgtttttatttttcaaaccgagcagggttctgccgtgccccatggataacgtaccttctgcaatgaggttctggatgctttcaggaagcgtcagcagtcttaaatggttggcaatatgaggtctgcttttcccgagccgtttagcgagctgttcctgcgtaatatccaaatgcttcagcagtgaatcatatgcaagagcttcttcaagcggtgataaatcttcccgctgaaggttctccaatagggcgatttcccgcatcagcgattcagataactcccgcacgatagccggcactgtctctttaccggcaagttttgcggcgcgataacggcgttcgccggctacaatatcgtagcccttcaatgattttctcacgataatgggctgaagaatgccatgctgaatgatggattccttcagttcagctaatgactcatcatcaaattgttttcttggctgataaggattggggcgtaaatcactgatcttaatctcttccactgtctcttcagacaaatcaacttgattaaacaacgcattaatcccttttccgagcccgcctttagccattcgctgccacttcctttgctaaatctaaatatacttccgcacctctcgaacgcggatcgtataatatgatcggcttgccatgactcggcgcctcacttaaacggacattgcgagggataatggtttgatacactttatctctaaagtatttcttcacctcttctataacttgaataccgagattcgttctggcatcaagcatcgtcagaagcactccttctatcattaagtctgtatttaaatgtttttgcacaagccgaactgtatttaataattgactcaatccttcaagagcgtaatattcgcactgaaccgggataacaactgaatctgacgcggtaagcgcattaatcgttaataacccgagagacggaggacaatcaataatcatgtaatcgtaattttgtttcactgattctaatgctcttttcagcctgacctctcttgaaatcgtcggaaccaattcgatttccgctcccgcaagctggatcgtggctggaatgacatctaagttctctactgaagtcggtttgataatctctgttacatctgcgtcatctactaaaatatcgtacacacaatgatccacatcggctttttcaatccctaatccgctcgttgcgttgccctgcggatcaatatcaacaagaagaacccttttacctatgtaagctaagcaagcccccagattaacagaagtcgttgtcttcccgactccgcctttttggttcgtaattgctatgatttttcccacgatgtcacctaccttcacatgaacatgtactgtcttgtttctatcttatcaaaaaaagagtaaagcgttttatttttttcataatttgtttatcagcaagtgaaaaaaatgtaaacgaaaaagacactttcccttataagttctccgataaagtgacttttttgactgtgaaaagacaatatacgacgaaaaaatataaatttttacatttataatgtatggtgtacaataaatctatcattatcctaaaatagttttttgactaaaataaaaactcccctgctgatcaggagagtttttatttaggtatccgaatggtaagctgaatgtactcttcgaattcttcttcctcagtattcagtctgacgccgctgtcttccaccatggacaatgactggcgaatcgtattcattgcaattcgtgtatctcggctgaacgctttgcgtctcggctttggtttctgcttattctgttcaagcattttcaccactcggtcttccgtctgcttgacatttaagcttttctcaatgatttccgcaagcaaagtgacctgaagctccggctgtttgagcgggatcagggcccttgcatggcgttccgtgatttttttctccataatcgcatcctgaacgggttccggaagctttaacaatcggagcttgttcgcaatcgttgactggccctttcctaaacgctgcgccaaggcttcctgtgttaaatcatgaagttctaacagccttgcgtacgcatgagcttcctcaatggaggacaattcttccctctgcaggttttcaatcaaagcgacagatgccgtttccgtatcagagaaatcctttataattgcgggaatcttctcccattcaagcgtctgtaccgctctccagcgcctttcacccgcaatgagctcatattggccttcatcttctgtatgtctgacaacaatcggctgaatgatgccgtgtgtatggatcgtcattgctaactctttgatcttttcatctgagaaaatggtgcgtggctgaaaacggttgggaacgatagcatgtaccggtatctcgagtatctcttctttatttgtatcatgctcagctatctccggttcctcttccttctcaccaaacccgaagaaacgagagaatgaatgcttcatgtacctacaccacctttaaaaactgccatttttataattctattttctcatggtttttcctgctgtatcttcatcaattttgcagaaaatatgatggaattgtcacatcaggctgtctaaattacccttcaattggcgatttatttggagtacccggttttctcggatattttttcggagtgcttttcatcttgcgaattaacataatgttccgttcactttcttcaacgggaagtgtaaaggaatgaacttgttcaagctctcctcccaatactttaatcgccttttgtcccgctttcaattcttcatcagccgctgctgcttttagagcggcaaatacgccgtttttcttgaccagcggcagacaaagctcgctcagaacagacagacgcgccactgcacgggccgtcacgagatcaaagctttcccggacgtccttgcgctgtccgaacgtctctgccctgtcatggacaaatgtcgtatgctctaattgtaaagcatcagcgagattttccaaaaacgtaatccgcttattcagtgaatcgacgatggtgacatgcagatgcgggaagcagattttgatgggcaggcttggaaaaccggcaccggcgccgacgtcacaaagagtggtgaccttttcaaaatcaatataaaatgccgccgtaatcgaatcataaaaatgcttgagatatacttcctttttctcagtgatagacgtcagattcatcttttcgttccattccacgagcatctggtaatacaactcgaattgctccagctggcggtcagaaagggaaatccctttctccgctaaactggatgtaaattcctctatattcatgccgtcatcctttctattcagctaccttggcaatacggccctgctccaggtataccagcaggattgaaatatctgccggattgactccggaaatacgggacgcttgagcaactgataaaggacgcacttctttcagcttttggcgggcttcagttgcaattcctttaatggcgtcataatcaatccgatcagggatttttttgttttccattttcttcagcttctccacttgctgcaaggatttttcgatatatccttcatatttcacctgaatttccacttgttccgccacatcttgcggaaccggagaatcagcaggtgcaagttttgtcactgtttcatagttcatttccggacgtttcattaaatctgtgccgcgcactccgtctttcagctcgcttccgccgagtgaacggatatattcctgattttcaggagacggcttgataataacagaccagagacgttttttctcagcctcaatcgccgcttttttcttttcaaacgcttcatagcgctcatcagaaattaagccgatttcatggccgatttccgtcagacgaagatccgcattatcatggcggagcagcagtctgtattccgcgcgtgaagtcagcagacggtatggttcattggttcctttcgttaccaaatcatcgatcaatacaccgatatacgcatcggaacggctgaggatcacctcttcttttccaagcgctttgcggcctgcgttgattcccgccataattccttgtccggctgcttcttcataacctgatgtaccgttaatttgaccggccgtatacaggttaggaatttttttcgtctccagtgtaggccagagctgcgtcggtacgatcgcgtcatactcaatcgcatatccggctctcatcatttgcaccttttccagtcccggaatggtcgccagcatccgctgctgtacgtcctcaggaaggctcgtggataaaccttgaacgtatacttcctgcgtattcctgccttccggctcaaggaaaatctgatgacgcggtttatcattaaaccgaacgactttatcttcaatagaagggcaatatctcggccccgttcctttaatcataccggaatacattggcgaacgatgcagattgctgtcgatgatctcatgagtctcaggactcgtgtaagtcagccagcaaggcagctgatcggtaatgtattcaaccgtttcatatgagaaagcgcgcggaaccgggtcccccggctggatttctgttttgctgtaatcaatggaatcgcttgatacgcgaggaggggttcccgttttaaaacgaacgagatcaaaaccgagctcctctaagtgctcagaaagtttaatagacggctgctggttattcggaccgcttgagtaagacagatcaccaagaatgatccgccctcttaaatacgtccccgttgtcagtacgaccgttttcgccttatattcagcaccggtttgcgtaatgacaccgcggcactcgccgtcttcaatgattaaacgctcggcaatcccttgaagaagtgtcaaattcggtgttttttccagcgtatgcttcatttcatgctgatattggaatttatccgcctgcgctcgcagcgcccgtacggccggaccttttcctgtattcagcattctcatttgaatatgagttttatctatatttcttgccatttctccgccgagcgcgtcaatttcgcggacgacaatccctttcgcggggccgccgacagacggattacatggcataaacgcaaccatatcaagattaatcgtcaaaacaagcgttttagctccctggcgcgcggatgcgagcgcagcctcaacaccggcatgcccggcgccgatgacaatcacgtcgtattggcctgcttcataccccatggttttttcctcccttttatttacctaaacaaaattgtgaaaagagctgatcaattaagctttcgtggacggcatcaccgatgatttcgcccagcagctcccagcaccttgtcagatcaatttgcaccatatcaatcggaacatcctgctcaattccattcagtgcatcatcaatggcttgctttgcctgatgcagaatcgagatatgacgggtgttgctgacatatgtgagatctccgctttcgatcgctcctgtataaaatagcgactgaatcgcttcctctaaatcttgaatgccttcttctttcagcaatgaggtcgtgacgacgggcctgcctttcgcaagctctttgacgcgctcagcgtcaatcttagcctcgagatccgtcttattcataatgacaatgacgtccattccctcaaccgcttcaaataatttcacatcttcttcagaaagctcttcgctgtggttaagcacaagcaaaatgagatccgcttccttcagaacctggcgtgaccgttctacaccgattctttcgacgatgtcttcggtctcacggattccggcggtatcaacaagccggagcggcacgcctcggacattgacatattcctcaatcacatcacgcgtcgttcccggaatatcggttacgatcgccttcgtttcatggacaagactgttaagcaaagaggatttccctacgttcggacggccgatgatgacggtagacagtccctcgcgcaaaattttcccctgctcagacgtacggagcagcgcctcgatttctttcttcacgccgctcgccttctccactaagagctgatgcgtcatttcttcgacgtcatcatattccggataatctatattaacctcaacatgggcaagtgtttctaataattcatcacgtagacggcggacaagtgcggaaagccgtccttccatctgattcatggcgacattcatggcacggtccgttttggccctgatcagatccatcaccgcttccgcctgtgacaggtcaatccgtccgtttaaaaatgcgcgcttcgtaaactcaccgggttctgccagcctcgcgccttctcttaaagcaagctggagcacctgattaaccgtcacaatccctccgtgacagttgatttcgatgacatcttcccttgtgaatgttctgggcgctcttaaaacagacaccatcacttcctcaataatccgtcccgtagtgctgtctgcaatatgcccgtaatgaatggtatgcgattctgccgaactgagcgttttgcctttcggacccttgtacattttgtcggcaatttttacggcttccggcccgctcagccgaacgatcgcgatcgcgccttcacccatcggagttgaaatcgctgcaattgtatccatgctgttcacctctctttatctctgtttccatctatataaaaaattttatttacgccaaaattaaaagataacatagtttggtttgaagtggaagatacgttatccacaaaggcagaaattcatcccttattactttaacttatccacatgtgaataacaattaattttatttcctaaaaccttttttatcaacagcatacaccgaaaaagaaaaaacttaaacgccaaaagtatgattctgcttaggaatagagccaattttgccaataaaaaaaccgaagttccgattttacccggacttcggttttctgctatctttatgggaaataacgagatggcggtaccggccttcaccggtagaaaaagttttgatatttggatgcttcgccagagcgtcatggatgatttttctttcaccagacggcatcggttctaaatgcacatcttttttcgttttcgatacctgcttggccagcctgtttgccagctgatccagaatttctcttcttttcagacgataattctcagcgtcgacaacggcttggcggtactggccggagccgcggttcaacacaagctgcgtcaatgtttccagggcattgagtgtttgtcctctcttaccaatgagcagcgccgctttttcacccttaatatgaaaacaaactgtttttttgttttcctccgtgacaatctcggaaggcccggcaatggtattgatgatttcttccagatacgctttcgcttcctgaacggaattttttttctctttcagttctacgatcgcattcttttttccgaaaatacccaaaaaccctttatattcttcctgcaccaccgttatttctacttgatctttcgtcagttgaagttcctgaaggcctgattgaactgcttcttcgacattccgtcccgcagcagtcaccttcttcactttttctttcctcccgctttctgcgtttccggatcgtgtttaatgtccggtcctttaataaggaatgtctgagcaatcataaacaagtttccgactacccaataaagagaaagcgcgctcgggaagttgatcgcaaatacgatgatcatgatcggcataatccataccatcattgccatttgaggattctgagaaggatttccggccatcatcagcttctgctggacaaaagtggccacaccggcaacgataggaagaatatagtaaggatctttctcgcctaaatcaaaccataaaaagctatgctgtgaaatggcttgcgtacgcataatagcgtggtaaaatccgatcaaaatcggcatttgaatcaggatcgggaaacatcccgccagcgggtttaccccatgctttgaaaacagggccattgtttcctgctgaagcttctgctgcgttttttgatcttttgagctgtatttttctctaagcttctgcatttcgggctgcagcgcctgcatcgcttttgagcttcgaagctgtttgatcatcagcggcagaatcagcagacggattaaaatcgtaacgatgatgatcgataaaccatagttatcgcccgtcagtttcgctacgtacgtaatgacttctgacaatggatatacaacatatttgtcccagaaatgcggactattcgccgtaatcggctcttttacactcgagcatccggccagcagcacgagcataccgaccatactcagtagtaaccatattctccttttcaagaacgtttcctcctataccattctttataaaccttgtatgtattttagcatctttcagttttaaatggcggtcatttttcgccaaacaaaaggaagcgcttttaaaaacgtgaagaaaacaaaatatgagctatttcgacgaagatttcttatataaagaggtttttctgaataagtgctgcagactttttttcgtttcttcaatactgagttcagctgcgggttttctagcgataataataaaatctttcggcttgagaagctctttttcctcctggatcgcctgcctgattaaacgcttcacccggttgcgcacgacggcattgccgatttttttgctgacagaaagccctacccggagctctttctgctgcggctgatcaagggtatacagcacgaactggcggtttgccatagacgttccgcgtttaaacactttttgaaaatcttcatttttctttaaccgatttcgcttcttcactttgattcactccgatattcactcgcagaaacttttatttctatctaaaaaaaacgggccgccggaaaactgaagaaatttctccagttccgggcgacgcgtgatctcttttctcataatgtgaaaaaagaccactgacattattcagtggcctaagctgataatacttttctgcctttgcggcgacggcgtgctaatactagacgaccgttttttgaactcatacggcttctgaagccatgaactttactgcgtttacggttattcggttggaatgttcttttcatttatgacacctccctcgaggaatagctgttaaagacagtcttacttattatatttgtgctgcctattcattgtcaacttcagcagtgcttttatttcttacaaccataataggataacataccttaaccagtttagaaaccttaattttcatattcctttttttagcgcaaaaaaaaggccccggcctctgaaaaaaacggcatgtggataattttttggtcgttttttaatatccacaatcgttatcgacaacattttcacattgctaacccctgtggacaaagatttttcaacaagttgtcaggtttgtggataagattacgagaaccgttgcaagtcctcgcttaatttgatattatatttgtgttttaactcttaattacttatccagcctattctctttatccacaaagtgtggataagttgtggattgtttctacacagcttgtgtagattgttgtccacaacttgtggaatttgtcgaaaagctatttttctactatactatatgttttcaacatttcgtgtgtacgaatggtcagagccatatgctctttttttgtgttctataacagggaaagatcgctgattttaaaagaaaaggagggctgtgccggataatggagaatatattggatctttggaatcaagccttagctcaaattgagaaaaagctaagcaaaccgagcttcgaaacttggatgaagtcgacgaaagcccattcgctgcaaggagataccttaaccatcaccgctcccaatgaatttgccagagactggctggagtccaggtacttacacctcattgcagataccatatatgaattaaccggggaagaattgagcgtcaaatttgtcattcctcaaaatcaggatgaagaaaactttatgccgaaacctcaagtggaaaaagcggcaaaagaggaaccgtctgattttccccaaagcatgctcaacccgaaatatacattcgacacatttgtcatcggatcgggaaaccgattcgcccatgcagcatcactggctgtggcggaagcacccgctaaagcgtacaaccctttatttatttacgggggggtcggcttaggaaaaacccacttaatgcacgcaatcggccattatgtcattgatcataatccttcagccaaagtggtgtacctgtcttctgaaaaattcacaaatgaattcatcaactcaatccgcgacaataaagccgttgattttcgcaaccgctaccggaatgttgatgtacttttgatagatgatattcaatttttagccggaaaagaacaaacacaggaagagtttttccatacattcaacacgcttcacgaagaaagcaaacaaatcgtgatctcaagcgacagaccgccaaaagagattccgacccttgaagaccggctgcgttcgcggttcgaatggggactgattacggacatcaccccgccggatctggaaacgcggattgccatcctgagaaagaaagcgaaggcggaaggccttgatattccgaatgaagtcatgctttacatcgcgaatcagattgacagcaacatccgcgaactggaaggggcactaatccgggttgttgcctattcatctttaatcaataaagacattaatgcggatctggctgctgaagcattgaaagatattattccgtcttcaaagccgaaggtcattacgataaaagagattcagcggattgtcggacagcagttcaacattaagcttgaagatttcaaagcgaaaaagcgtacaaaatccgtcgcgtttccaagacagattgcgatgtatctttccagagaaatgacggattcttctttgcccaaaatcggggaagaatttggcgggagagaccatacaaccgtcattcacgctcatgaaaagatttcaaaactgctgattgatgacgagcagcttcagcagcaggtgaaagaaataaaagaacagcttaaataatagagccctcggatgaatcggggaaagtgtgaataacttttctatagccatgcacagtctgtccacatgtggataggctgtgtttcctgtctttttcacaacttatccacaaatccacaggccctactattactactgctattttttaaaatatattaattatattatccgttaggaggataaacatgaaatttacgattcaaaaagatcgtttagtcgaaagtgtacaagacgttctaaaagctgtttcatccagaacaacaattcccattcttaccggtattaagatcgtagcctcagatgaaggagtatcatttacaggaagcgactctgatatttcaatcgagtcattcattccaaaagaagaagatgataaggaaatcgtgacgatcgatcagccgggaagtatcgtgctgcaagcccgtttcttcagtgaaatcgttaaaaaacttccgatggcgactgttgaaatcgaagttcaaaatcaatatttaacgattatccgctccggaaaagccgaatttaatttaaacggccttgatgcagatgaatatcctcatcttccgcaaatcgaagagcatcatgccattcagattccgacggaccttttgaaaaacctaatccgtcaaaccgtgttcgctgtgtccgcctcagaaacacgccctatcttgacaggtgtaaactggaaagtggaaaacggtgaattattatgcactgccacggatagccatcgactcgctttaagaaaggcgaagcttgatattccggaagacagctcttataacgtcgtcatccccggaaaaagcttaaccgagctgagcaaaattcttgatgacagccaagaactggtagatatcgttattacagaaacgcaagttctgtttaaagcgaaaaacgtattgttcttctcaaggctgcttgacggaaattatccggacacgaccagcttaattccgcaggaaagcaaaacagaaatcgtcgtgaacacgaaggaatttttacaggcgatagaccgtgcttctttattggcgagagaaggccgcaacaacgttgtaaagctttctgccaaaccggcagactcgcttgagatttcatcaaactctccggaaatcgggaaagtagtcgaagctgtgctggctgaccagattgacggcgaggaattaaatatttcattcagtccaaaatatatgatggacgcactgaaagtacttgaaggagcggacatccgtatcagctttacgggagcgatgagaccgtttcttatccgtacgccgaatgatgaaaccatcgttcagctcatccttccggtcagaacgtattaaacaaacagaatgtgctgccggctaatgttcggcagcttttctgttcatcagccgctccctcaagcaagttttccctttccttatttcaggattttttagtacaattagatattagtgatatttgaaagaggtcgatattatggcaaatccgatttcgattgatacagaaatgattacgcttggccagtttttaaaattagccgatgtgattcagtccggcggcatggccaaatggtttctgagcgagcatgaggtgactgtcaacaatgaacctgacaatcgccgcggcagaaaactttatgttggagacgtggtcgcgattgaaggatttggttcatttcaagtcgtcaattaaagcgggtgacagcggttgtatatccaaaatttagaattaacatcctaccgtaattatgagcgcgctgagcttcaattcgaaaacaaggtgaatgtgatcatcggggaaaatgcccaaggcaaaaccaatctgatggaagccatctatgttctttcgatggcaaaatcgcaccgcacctcaaatgataaagaacttatacggtgggacgaagactatgctaaaatagaaggaagagtgatgaagcgcaacggggacatcccgatgcagctggtcatctccaaaaaaggtaaaaagggcaaagtcaatcatatagagcagcaaaaactcagtcagtatgtcggagcgctgaacaccattatgtttgcccccgaggacttaaatctcgttaaaggcagccctcaggtgaggaggagatttcttgatatggagatcgggcaggtatctgccgtttatctgtatgatttatctctttatcaaaaaatcctttcccagcggaatcattttctgaaacagctgcaaagccggaaacagactgaccggaccatgcttgacgttctcactgatcagctgattgaagcagccgcgaaagttgtcgccaaacgtctgcagtttacggcacagcttgaaaaatgggcgcagccgatccattccggcatttcccggggacttgaggaactgacgcttaagtatcacacggcgcttgatgtatcagatcccaaagatttgtcgaaaataggtaacagctaccaggagtctttttcgaaattaaaagaaaaagaaatagaacgaggcgtcacattattcgggccgcatcgggatgatgtccttttttatgtgaacggacgcgatgtgcagacttacggttcgcagggacagcagcgtacgacggctttgtctttgaagctggccgaaatagatttaattcatgaagaaatcggagaatatcccattttacttttggatgatgtactaagcgagctggatgattaccgccagtcccatttgcttcatacaatccaaggccgtgtgcagacatttgtcaccacgacgagtgtggatggcattgaccacgaaaccttacatcaagcaggaatgttccgtgtggaaaacggtgcgttagtgaagtgaagaaatgaggtgagcgattgtatattcatttaggtgacgactttgtcgtttcaacacgcgatatcgtcggcatttttgactgcaaggtcaatgtatcgccgatcgttgaagaatttctggacagacagaaagaaaaagtagtgccgtccgtaaatggcacaccaaagtctatcgtagtcacgactgagaatatatattactctcccttatcttccggcacactgaagaaacgtgcgcaatttatgttagaaatagattcttagcggatctttacaatgaatatatcgtttaagaaaagtgtaggtgaatgtgcatggctatggaacagcagcaaaatagttatgatgagaatcagatacaggtattagaaggtttggaagctgttcgaaagagaccggggatgtacatcggatcaactaacagcaaaggccttcaccatttggtatgggaaatcgtcgacaacagtattgacgaagccctggccggttattgtacagatattaacatcgagattgaaaaagataacagcattaccgttaaagacaacgggcgcggaattccggtcggtatccaagagaaaatgggccgtcctgcggttgaagtcatcatgaccgttcttcacgcaggcggaaaatttgacggaagcggatataaagtatccggcggtcttcacggtgttggggcgtctgtcgtaaacgccttatcgaccactcttgacgttacggttcatcgtgacgggaaaatccattatcaggcgtatgaacgcggtgtaccggtggccgatcttgaagtgatcggtgacactgataagaccggaacgattacgcacttcgttcccgatccggaaattttcaaagaaacaaccgtatacgactatgatctgctttcaaaccgtgtccgagaattggccttcctgacaaagggcgtcaacatcacgattgaagacaaacgtgaaggacaagaacggaaaaacgagtaccactacgaaggcggaatcaaaagctacgttgagtacttaaaccgttccaaagaagtcattcatgaagagccgatttatatcgaaggcgagaaagacggcataacggttgaagttgcattgcaatacaacgacagctatacaagcaacatttattctttcacgaataacatcaacacatacgaaggcggcacgcacgaagccggatttaaaaccggtttgacccgtgtcataaacgactatgcaagaagaaaagggattttcaaagaaaatgatccgaatctgagcggtgatgatgtgagagaagggctgactgccatcatttcaattaagcaccctgatccgcaattcgaagggcagacgaaaacgaagctcggcaactctgaagcgagaacgattactgatacgctgttttcttccgcactggaaacattccttcttgaaaatccggactcagcccgtaaaatcgttgaaaagggcttaatggccgcaagagcgcggatggcggcgaaaaaagcgcgggaattgacccggcgtaaaagcgcacttgagatttccaatttgccgggtaaactggcggactgttcttctaaagatccgagcatttccgagctgtatatcgtagagggtgactctgcgggcggatcagcgaaacagggacgggaccgtcatttccaagccattctgccgctgcggggtaagattctgaacgttgagaaagcaagacttgataagattctctcaaacaatgaggtcagatcaatgattacggctctcgggacaggaatcggagaagactttaatcttgaaaaagcgcgttatcataaagtggttatcatgacggatgccgatgttgacggcgcccacatcagaacgcttttattaacgttcttctacagatacatgcgggagattattgaaaacggctatgtctacattgctcagccgccgctttacaaagtgcagcagggaaaacgggtggaatacgcttataacgataagcagcttgatgagcttttaaaagagcttccgcaatcacccaagcccggcctccagcgttataaaggtctcggggaaatgaacgcgactcagctatgggaaacgacaatggacccggcgaccagaacgcttctgcaggtcaatcttgaagatgcgatggacgctgacgagacttttgaaatgctgatgggtgacaaagtagaaccgcgcagaaacttcatagaagcaaacgccagatacgtgaaaaaccttgatatttaaccatgaaagccttattttcgttaagaaataaggcttttttctcaaagctgcttcaaacagtctctgaaaacccgcaaaacccgtatattctactaaattaatgtgtataaacacaagtttattgatataatggagaatagtgaaatcgtattgaagatcataatggacaatctactcccacattatttcatgtgatacttcagggaggtttttttaatgagtgaacaaaacacaccacaagtacgtgaagtcaatatcagtcaggaaatgcggacatccttcctggactacgcaatgagcgttatcgtatcccgggcgcttccggatgtgcgtgacggtctgaagccggttcacagacggattttatacgcaatgaatgatttaggcatgaccagtgacaagccatataaaaaatctgcccgtatcgtcggtgaagttatcggtaagtaccacccgcacggtgattcagcggtttacgaatcaatggtcagaatggcgcaggattttaactaccgctacatgcttgttgacggacacggcaacttcggttcggtagacggcgactcagcggctgcgatgcgttatacagaagcgagaatgtcaaaaatcgcaatggaaattctgcgtgacattacgaaagacacgattgactatcaagacaactatgacggttcagaaagagaaccagccgtcatgccttcaagatttccgaatctgctcgtgaacggggctgccggtattgcggtcggaatggcgacaaacattcctccgcatcagcttggggaagtcattgacggcgtgcttgccgtaagtgaaaatccagagattacaatccaagagctgatggaatacatcccgggaccggattttccgacggccggccagattttaggccggagcggcatccgtaaggcatatgaatccggacggggatccattacgatccgggctaaggctgaaatcgaacagacatcatcaggaaaagaaagaattattgtcacggaacttccttatcaggtgaacaaggcgagattaattgaaaaaatcgcagatcttgtccgggacaaaaaaatcgaaggaattaccgatctgcgtgacgaatccgaccgtaacggaatgagagtcgtcattgagctccgccgtgacgccaatgctcacgtcattttgaataacctgtacaaacaaacggctctgcagacgtctttcggaatcaacctgctggcgctcgttgacggacagccgaaggtactgagcctgaaacaatgtctggagcattatcttgatcaccagaaggttgtcatccgacgcagaacggcttacgaacttcgtaaagctgaagcgagagctcacatcctggaagggttaagaattgctcttgatcatttagacgcggtgatttctctcatccgtaattctcagacggctgaaattgccagaacgggtttaatcgaacaattctcactgactgaaaaacaagcgcaagccattctggatatgcgtcttcagcgattaaccggtctggagcgcgaaaagattgaagaagaatatcaatcacttgttgcgcttatcgccgagctgaaagatattttagccaatgaagaaagagtgctcgaaatcatccgtgaagaactcaatgaaatcaaagagcggttcaatgatgagagacgcactgaaatcgtgacgtccggtcttgaaacaattgaagatgaagatctcatcgagagagaaaacatcgtcatcacgctgacccataacggctatgttaaacgcctcccagcgtccacataccgcagtcaaaaacgaggcggaaaaggcgtacagggaatgggtacgaatgaagatgacttcgtggaacacttaatttctacatcaacgcacgatacgattctgttcttctctaataaagggaaggtataccgttctaaagggtatgaaatccctgaatacggccgtacggcaaaaggtattccgattattaaccttctagaggttgaaaaaggcgaatggattaatgccattattccggtcagcacatttgatgaggagctttacctcttctttacgacaaaacaaggggtatcgaaacgtacggcactgtcccagtttgcgaatatacggaataacgggctgatcgctctgggtcttcgggaagacgatgaactgatggccgtccgcttgactgacggcaagaaacaaatcatcatcggaacgaagaacggtttgctgatccgtttcccggaagaagatgtaagacaaatgggacgcacagctgcaggtgttaaaggcatcacgctgacagacgatgatgtcgttgtaggcatggagattctcgaagaagactcccatgtcctcatagtgacagaaaacggctacggcaaacgtacaccggcttcagaatacagagtccaaagccggggcggaaaaggtcttaaaacatgtaaaattactgacagtaacggtccgctagtaacagttaaagccacaagaggcgaagaagacttaatgatcattacggcaagcggcgtgttaatcagaatggatattaatgatatctccactacgggacgcgtaacacaaggcgtccgtctgatccgcatgtctgatcaagagcacgtggccactgttgcgctcgtggaaaagaatgaagaagagccggaagaaaccgaagaagtataaacgaaaaagcgcagctgtaacaggctgcgcttttactatataaagaaataaaaaagctttgacacatagcgatgatgctgatataattctttttgttgtctttttaatagaaaggcaagcctagcgaaaatattttttgaaaaagtattgacctagcaaactgaaaatgttatgattaagaggtcgcttcgagaggagccagatccggttacgacaggcggaaaaaaggcgacgagcttgccgaagaaaaaagacagcagaatgactagcagacctgatgccaaaatgcttccgtaaatagctgaaatcccgtattccttaccgatggaaataatcggcgccaccgctgtgaacgtacagccgagcacaacgggcaagccgatgccgaaaaatttgtttctccacacttgaagcagcgtagccgccccgcacataaaaatgtcaattgaaacgagataagtcagctgttttgcgttcagccccagtgccgctcctacaattaagggaacgacaacagcgccggcatacatggcaagcacatgctgaataccgagggaaagtgttttggcatagccgtttttcatgaacggacctcctgtacaaatgtcacttttccgtcctcaagcgattgaattctcgccagtgattcgacccggcatccttttttcacgagctcatctcttcccggctgaaatgatttttcgataacgatgccgattccgctaactgctgcaccagcttgtttcacgatggacaaaagcccttctgccgcctgtccgttcgctaaaaagtcgtcaatgattaacacgcggtcttctttagataagtgactgccggagacggcaatctgactttctgtttttttcgtaaaagaatagacggacgccgtcagcagatcatccgttaacgtgagagacttcctttttctcgcaaagatgacgggaacaccgagctcaagaccggccatcaccgcaggggcaatgcccgaagattcaatcgtgacgatttttgtgataccgtctttttcgaaacggcgcgcaaattcttgaccaatctgctgcatgagaaccggatcaatttgatgatttaaaaaagaatcaactttcagcacttggtcagaaagaacgattccgtcttcttctatttttcgttttaatgcttccacaatgattacccccgcttatataaaataaaaaaagcattgcccgctctcaaaaaagagcaagcaatgccgaataatctacacgtaacggcgaatgaaagccgtcccattgctcactcatagtcggtcatttacggtgaccggtagaaacttgcgtgccatatccacgcgattatatgagtgttcgtatgatattaatcaaattataacaagatacagtccttttgcatagagaaatttgaatatttccgaacttttacaaagaatcagtttctattattcgtctttttggaatttttagaaaaacacccggcgtataccgggcgtttcgtttataaatataaatttgaatatttgccgacgagatactcaataagatattggacgttcagctcttctcccgttgcatctttaatgatgtctagcggcattttacgtcttccgtgctgatgaaccttttctgtcagccattgcttgatcggctcaaaatcgccccgttctattaattgatcaaattcaggcagatcgtcaagcatggtattcttcagctgagccgcatacatatatccgagcgcataggaagggaaataaccgaaatctccgcctgcccaatgaacgtcctgcaaaatgcctttcgcgtcagatggcggcgtaatgcctaaataatcatgatatttttgattccacaatgcaggcagttcttcaactgtcacttcattgctgaaaatcgctttttcaatttcataacggataataatatgaagcggatatgtcagctcatcggcttcaattcggataaaggacggtttcgcctcgttgacggcgcgtacaaaatcctctctttttacatcttgaaattgatcaggcgaagcctcaatcattttttcataatatgcggtccaaaaatgttgatttctggcgataaagttttcataaaataacgattgggattcatgaatgcccatggatgcaccgtcagataagttcgttccgctaagcgcttcgtcaatattctgctcgtagatcgcatgcccgcattcatgtatcgttccgaaaatcgcggtgcggaaatcgttctcgtcatatctggtcgtgacccgcacatcgccgcggttgattgtcgtcataaacggatgcaccgtctcgtccaggcggccgccgtcaaactcatatccgagctcttttaagaaatacaatgatagatctttttgtttttctttcggaaatgtttttgttataaaggaggtgtccggtttattgccggatgccgtcacttttttgacaagcggaataatcgcttccttcaattcagaaaacagctgatccagcacctttaccgtaacacccggttcgaaaatatcgagcaatgcgttatacgggtggtcttcataaccccaataagaaataaaccgcttattaaaatcaatcagcttctcaaggtaaggagcaaacatagaaaaatcagaagccgcccttgcctcctcccaagccgtttcagctttcgatgtcaaaatgacgtattctctatattcatcttcaggaatttttttattatgatcataatctttttttgcaagttccgccgctttcactgtatcttcaggcagctcttcggcatgcgcgagaaggatgtcaatcagctctttcatccggtcggatgtctggatttgaaaaacgtcagccgacagctgaccgatgctttccgcacggtcatcagagccttttttcggggctcccgttcttgagtcccaatgcataagcgcaatggcttcttcatagtgggatacccttttcagcagatcaaaaaattctttttcatatgtatgtaaatccataaccgttccctcccttttcactatcaattacaggctaatggaacgccgtgataaagtcaacttcccggatttaaaaaaagccgcaggatgaaaatcccgcagcatgtgtttttatacgattttcggtgtaacaggcaagacctttttgacttcggccagaacccgttcgctttctccgcccgcgtaaatggatatggttcctctgtcttgattagagcggataaggcggccgattccctgccggactctcagcagcatgtacggcagatcaacttcctcaaacgggtcttttttcgctccgttccgctttgcggtaaatacagggtcatgcggcggataaggcaacgcccaaatggtcacatttcggagtgagtcacccggaatgtcaagaccctcccataagtggacggaacaaagcactgattcttcatcccgctgaaatttttcgaccaggctgctgatctcttcgtcaccttcgtagtatatcggatacggcagttcccatgcggcagcctgttctttaaattccttcatatcttcaaaagaagggaaaagaacgagggtgcggccttcattctccttaatcgtttcaatggttctcgctgttttctgctcagacgtcatatcaccgtgaagcgtaacagacatttgctcctcgtagtcgtacggagattcaacggtaaatgataaaggatcgcggattccaagactgtctgcaatataatcaaatgaaccgccctcagaaagagtggctgatgagaaaatataagggatctttttagaaaagaccttttctcccagcacttcggctacagttctcggcatcacgacaaatgttgagtctgtatcctgcttttcaagccagctgatggcatccttttgatacagcgaaagtgaatatgccatttgttcgacgtattcttctacgactgacagctcgtacttatcaatcgtatacatttcggattcaaatacgagcgcctcgccgattttatcaagcagacggcacagttcgtcagctgcacgcttaacgcgctggtcgttttggatatccaatcggtgggagccggcgatttccttcgattcctctgacagcacatagaaaaactcatcatttgcggcaagggaatcttcaatcaattcggcaaattcctccctgatgtcattttgaagcaggcgctctaaaaacagctcaagcgtcgattgcttcacacgataggttaacgctttttgcgcggcgaattccagcagatgcccttcgtcaaacacgacggcgctgtgatccggcaaaagcggcagctgcccttcccttttgcgtgattcttctgtccatacatgttccatgtagaaatcatgggaacaaacaatcagatccgttgattttctgtaatgatctcttgaaagtgttaaaccgcatctatgtctcatatcacatgttaaacaatcctggaaggaatcatagcttacgcttgaccactcttcattcgtcaaatcagcgtactgcttgcggtcgccgtacggataaaagcgctgcatcgcttgtgattcatgcacgaatgaaggcagcgactcataaagatccagccacttttcatcatcagaacgctgcatcgttttctcaagctttttcagacacaggtactgctcatgggattttgacagccttgtatcaatctgtaaatccaaatgttctgtcagcttggaaatatcgccttcttttttgacaagctgttcaattaacgtttcatcggcgcatgcaataatggccggtttccccgtatatctggcatagctgatggcaaacagcagatacaccagcgttttccccgtaccgactcctgcctcagcgaacatgacctttttctctttaaatgcccgttcaagctgaaacgccataaatacctgctcatcccgaaggtcaaagcctttttcgggaaggatatcgtaaaacacgtcaccaatccaattgttcaattcttcgtaaaaattcttttcttttgttaaagcaaaaggcaaacgtgatgttgtcacccaactccaacccctaactattcggcattcagaccatctataatatcatttaacccttttcaatacaacaaaaaaacttggccgcgccaagtttttgtaattgttatttccgattaatgacatgtgaacataaaaacggatggtctgttgaatgtgtgtgttttaccgcattttcaagattttcctgtgcgtgtgtcacggcggaaggatctagctccgctccggcttcctgcagctgggacgcagttgcttctaacgccttttgtattttactgaagtactcactgttcagcataaaataagatcacctctcaaatagaaataatcatcattctatgccgatgcctcactttctatacatgccttcctgaatgatccgcacctgacctgcacaaactacaacagatattcgatcgaatatccatcttcacaaatttattctatccgggagtgatggttacatgagttataaagatcgattagatcagcattctgaattgtttcatcacaattggacgcggccgaaacgctctaaatcgcaagtgaacggccacaccgaaatgtcccagaccaacattattttacggagcaacgcaaaagcgcaccgctggtaatggcagaataaaacgtaaagatgttaaaaggctgtcgatattcgacagccttttaaaattatttctaatgaaattttttctgactattttcttttctccacataaatagttttagattgaactgcatctttcattttcccacctttgtataactcaacattaacctgccatctctctttaaatccaggttttagtagtttactaaaataaaacttcttaacaggtgttttattcgagaatgaacctttataggaaaaatcaccaatattgtattctccatctaaggtggtaacacccattcgatagttcaatgtcccacattttccatttgtctgagcatatacatcaatagaagtagcatttcttgtatacgttgttgcgtcagtccaaaccctagcttcacaacctttaattccatgaactgtttgccatgaactcatggctgcttctgctttaggactgcaaataaaagtagaccctgctatcagtaatgcagaagcacccatcaagattttcgatacttttttcattaattccaactccttcatatttttacataaaatattataaaacgatattatatatatatcaagactagtaggtaaattttaagaaattagtaaactaaagatacttataaaaaagcaaatccattaaggttttttctttattttgaggaaatttacagccaatttatgtatttactttattatccaacaatacctcacagatatttatatttaaaagtataataaatagccgaaaaacaagaacactagttcctgtttttcggctataacttgaaagacttattcataacctatttttaaaatcatgttgtcacaaaaattctgctataaaagggactatatttttgaaattgtttttttcttttttgcccaatactgataataatccgctttaataaaaccgttaaagagcttgcgtttttttgtcgcttttcttccgtaggcttcttcaaattgttcatttgacgtcagcatgtaaacagaccatgtatcaagagattcgaatgcccggcccatttctttatacatccgctcgacttcctttttttcgccgagccgttcgccgtacggagggtttccgacgattacgccgaattcgagtttcgtcgtgaaatcctgcacccgcatttgcttgcattcaatcagatccccgagccccgcttcttctgcattttctttggcgatgtttaccatccggtgatccacgtcacttgcaaaaatctgcagcggctgatcatagttcgccttttcttccacttcaagacgcgccttgtcccacagttcttttccgatccattcccagtcttctgagacgaaatcacgattaaatccgggagcaatgttttgcccgattaaggcggcttcaatcgctatcgtgccggaaccgcagaacggatcaacgaacggacggtcaggcgtccagttggttaacagaactaacgccgcagcgagcgtttctttaatcggagctccgccctgatcaaccctgtatccccgtttgtgaagacctgttcctgatgaatccagcgtgatgacggctttatctttcaaaagcgaaatctccactttgtactcgggacccgtttcttcaatccattcattttgttttcctgattgcagcttcagcttttccgctatcgcctttttgacgatgcgctggcagtcaggcacactggcaagtactgatttcacggactttccgattaccgggaactttgcgttttccggaatatatgcgcgccagtcaatcgcttttgttttttcaaacagctcatcaaacgtttttgcctgaaactcggcgacctgtactttaatgcggtcagccgtccgcagccataggttagcgcggcagatcgcaagcgcgtctccttcaaaaatgacttttccgttgtctactttgcattcatatcctaaatcacgcacttctttggcgacaatcgcttcaattcccatcggcgccgtcgctattagtgtgtacttcttcatcgtatcaccctgtctcttttcagctttcgtttcattcaagataaaagctcccctttaaaggagagctctaatttgtcatatcaataaatgtttaacgttctgtaagccatgttttgttccgtcgtactgcaatcggctcatcacctcgtactcaggcggcaatcatctatctacagaaagtattctgtccttctatccgttcagttccttcaagaaggttcccctaccaaaatttgggtttctcgctcgaggggtttaccgcgttccactctcatcatttctgatgagacttcgtcactgtggcactttcaaggatactcagccatatccgaagacgtaggcttttttcctgccgtcagcctatcaaggctgccctagcttatttcttcgctaggcacgaacactacgggcatctcagcaccgtgcgagcatggactttcctctacagattcaaagatctgcagcgattacccgaacgttaagaacacttgttcattataaagcaacttgtctcatttgacaagtgcatctgtcttattcgtcataaagcttgctgccgaatacatgtttctcaaggttggacagccttttcagaatatcaaagttggtcgtattggactgcaccggctgttttttgcttgcttcttcaagctgttttttcagctgcagattttcctgctgcagttcttcaatttcttgatggaaagtttcataatccttaataatcatatctaaaaatttgtcaacgtcttcttgtctgtaacctctaacacctgttttaaattctttttccaaaatgtctttcgcagaaagctttactttatcagcaagcatctttttcacctcgtatcgtgaatcatcatgttatattttattcagaaacacgtcccgttgtcaaatgttctctggcatgttatgtaaagaagtcttcttcttcaacggcagcccggagatcgtccatcgtaatcgaataaatcggataaccgtctttttcgcggcgtttttccgcctgctgcagcatatatttcggcgacccttccatctccggatcatataaaagcaaaagcgcgtctgacttttcaataaagaacgcgtttttctgccggaattgaagcgggctttcgtacggccgatgcgtcaggctctcctcataatctgcctgtgcaagcaccgattcatacatttctttattcggttccttccacttttcctcctggccgtagaacggcgtgataacggcaacctttaattccggatactcttctctgagatcgtacgccgtttctgccgcccaaagctccgtccccagctgtccggatatgagaatccattccaagccttcgtcaagaaagcttctgagtctggtttctatcgccttttttatataaataagcgcccggtcatcatgtttaaagataccgagttcaaacggcttgtaccccgttacggctaatactttcaattgatcacctgcttaaaaaatggggctccccatcgggccccattttgattgatatccttaccgactttgcttaagcgttcaatactaataatcgcagcaagggcttccgcactgaaaatgctggtgtgtcgtcggatcaacatttgaaaaagtatgcggatagtaatgaacgtgctcaaagttgtggtgatttacgttagttgtatgttgcggatgaatatgcggcacaactgtgttagtaaaacaatggtgttcacagcaattagtcggatggacaatcggcggcattacgtttgggcaacaatgatgatgatgatgatgaaacatgctaaatcccctctccattaacttttattacactgttaagttatgaagaaaagcgggtgcatgttctaattcaatcacccaatttagaaatgcatcagcaagctgtctttaaaattcgtaaatacaaacgcaatcaaaaaaaccacgacaaagaacaagtaaaaaacacctttatacataccaactctcccctataaataactaacgctattttacaggatgcggcaccattctacaacaaaatcgatgcggattcagaaaaaaatatttttggcgaaacagctcggcttttgcgctttcccgggcaatatttcaagaggaatatttcctcctcagccgggcaattctcacttggagtttctcggcttctttttccgatatttcatcgtcttttgcagccttttgcgcggcctgcagagcttttttgaaatcttttgcgtgatgctcaaaatagattgccagctctaccgctgattgatgtctgcatatgtgaagagcggagtccgtcagtttctcccaaaggggcactgcttcttgccttcggttttgttttttataaagcatcgctaagtcaaaaagggcccgatccgaatcttcaaagtctttgccttgcagcgcttccagctgcgaaacagcgcgatcggtttctttatgagcgataaaccacttcgccatggcgtacgcttcctgacgttctgacgtctgatcagaggaggcaaaaatcttttttgacatatgaatgtaaagagcgataagggagagcacatcttgttcattatgggagagcactccttccaggagagccgggtcctccgcctttaaaaattggaaatacagcattggagccaaatacccgggtgtatcttcatcccttttaaaggccagctcttcattttcaacagccgaaagcgatacacgctctaatttatgtttccaaagccgtctcgccccgtgcagaagatcaaagtggccgaattcaggaagtttcggaagcctgtcccgaagcaatgtgtgccttgtttttacctgcggccaatcaaaggctttgccgttatacgtcacaagggacgtaatatcaacctcactcaaaaagctttggtaaagagccgcctcgtttcccggcttgggaagcagatgctgttttactataacacggtcttcatatactctcgcatgaccgagcaaaaagatcatattgccggccccgccgccaagtccggtcgtttccgtatcaaagaaaaacagctggtttttttcgtatccttcggctgataaagtatgcgtcaaaccgcctttattccataacgccatgacgtcatcaagttcattgaagctataccgtccgtggcggtgcgaaagcggatagacggtttcacggataaggcagtattcatcctcaaagaagaaaggcttcactcccaatgcctcccaatcttctctaaacgggacttgaatatcaggcaccggaagcgaagaagctgccggctttttctcagtttccgggagattcaggtggtttttcatccgctttaatttatttttcaaggacatctctcgtcccccttttcttttacacgtaatttaagagccggagaatcgctttctttgcatcaattccctctatttcagagccgatgcaggaaggacatccgtcttgacatggacattgtctgatcagacgctcagccccttcattgatttcatcaaatcgtttgtatacttcatcagcaagtccgattccgcccggataatgatcatacagaaagattgtcggcaatcccgtatgagcggctttgatctgcggcacgacatgtacatcatttcggtcgcacatgacgtatacaggcacgatatgctgcaggacgtgagcaatgcctaaaaggagctgttcaagcgttttttcaccgatctccgaatccgtctcttttaattcaagccacgctgcactggtatgcagctcttcttcaggaagatgaatcggtcctgatcctatattttcaaatgtcgtcattttaatttttttaaatatcgtcggaagagcgtttactgtcacgtcaccgaaatgtatggccgttttccttctgctttctgatctgtcaatttccagcactttcagctgcaccgctaaattggcatccgtataatattcgacatcgacttttcgcacgtatgcttttttgtgctcccaatcaagcttttcaacctggtactgcactccttcatgaagataaatcgcttcatcatgaagaagcgtcatcgcgctgaatctgtccatttctccgataatttttacatcagccgtttctgaccgatcaacgatgaccacgttttcctgtgaggccgaacggagactgatgtttgaagcgggaaatgattcgctcgcccagtgatagcgttcacggttttcgtgaaggacgccttcttcctctaaatactcgagaatgtctcttgcatcattttctccgaatgtttcatcggctctgaaaggcagctcatacgcagcgcatttcagatgatcgaccagtataatgagattatcagggtttatccgtgcagattctggagagcgtttaaagaaataatcaggatggcgcacaatatattggtcaatcggatcagaattcgccaccattacaatcagcgcctctccctgccgccgtccggcccggcccgcctgctgccatgcgctcgcgacactgcccgggtatcccgtcatcacacagacctgaagctggccgatatcaacgccgagctccagtgcatttgtgctgacaacaccgagaatgctgccgtctcttaacccccgctctatttctcttctttctttcggaagatatccgccgcgatagcctctgacagacttcgcgccgatttctttttttacgatttcctgaatgtggcttaaaataatttcaacccggacacggcttcttgcaaaaacaatcgtctgaatcttatttttcaaaaacgttttggcaagttcgttcacttccacagtggcgctttttcgaatatgcagcggtttattcacaatcggagggttgtaaaaagcaaagtgctttcttccgctcggggcaccgttgtcgtcaatcagtttcacagaatttcccgtcagctgctccgccaattctctcggattggcgattgtggcggatgtgcagataaataacggcgtgcttccgtaaaaagcgcagattctcattaaacggcggatgacgttcgccacatggctgccgaatacgccgcggtacgtatgtaattcgtcaatgacgatatatttcaggttttcaaacagactcacccattttgtatggtgggggagaatcgctgaatgaagcatatcgggatttgtaatgacaatgtgtccggcttttctgaccttctgcctgatggccggagaggtatcgccgtcataagtgaagcttttgatgtccatgcccgtctcatctatgatttcgttcagctcgcttttttgatcctgcgcgagcgcctttgtcggaaataaataaagcgcgcggcttgaggaatcttccgcgatagactggagaaccggaagattatagcacaaagttttaccggaggccgtcggtgtgacggccacaatgctttctccggtttgaaccgtttgaaaagcggagtattgatgtgtaaacagccgctcgatccccctctttttgagagccgcccggattttcgggtttaccttatccggcattggcatggttttcgcctcccgcggctcctcttcatgccaatgcacaatattttcatgatcttttaattcctgaatcagttcgctcagtgattttttcttcatcgtccacacctctttatgaggtacagtttaccgaatatttgtttgcctggctagatgaaaatactgcacaagaaaaaaagcaggggaatagccccctgcctacttcatttttattgtaaaaagctctgtttgtccttttttcgcctcatttgcgcctgcaaattgcaaaggctctgcggcatcaccgttcataattaccatagggatgacggtgctgcttgctttttcttttattaaatccagattgcaggttaaaagcaggtcgcctgtcttgactttgtctccctcttttacatgggcttcaaaaccttcgccgttcatgtttacggtatctaaaccgacatgtatcaaaagttccgctccggaaagggtgcggatgccgacagcgtgttttgtatgaaacagctgaatcacttccccctcaaccggtgaaacaatgtctccgtttgcaggttcgacggcgatcccgtcccccatcattttttgtgaaaatacgggatccggcactgaagccaaatccatcaccgctccgtcagccggagaaaaaatcacttcctcggccggctttttccggctgtctcccaatccgaataattttttcagcaatgtgttgtgctcccttcctaaatctgaatccgttaccagtttattctccactatttaaccatactttcttttttccttcaattcttaaccatacgggataacatcgcatagtctgttgtaaaaaggcggtggtcatatggatcaaaatgaaaacgataaacgttatttagaaagaaatgaagacatcatcagccatgcgatggatcaattttttcaatcaggcaccttctcagaattgatgcagggctttcagcatcttgtcaattcggctttcactgaagcacaagtgacgattgacgtcagggaagagcctgcgggcctctcagttgacatcagcatccctcagacattccgtgacggggatatgctggtggaaacgaaagaacgctaccttcacgtgactattcggcatgatcataagcaggcgcattcatcccatatgtcttcaagcatgacaagaaccgttgtcctcccttatgaagtgcgtgaagaagatatggaaacatcctggaatgagcagacgcttaccctctttttccctaaaaaataagcatgaatgatatctatcattcatgctttttatttaaagatactggtaaatcctttcacaagcgatccgacctggtttacggcgcttaccatctgccctgtcgtatccatcattttattaaagtcaaactgtccgttcgtctttttaaactgagagagtatgcctgagaattgggaaggctgctgctgattcggtctgggaacggggtaaggattcacaaatcccggcggtcccccgggcatgcctgcctgaggaggagcgagattatacgtctgctgcatttgaccatattcctgatttggataaaattgcggcggaaactgcccttgctgatgatactgctgctgcaacggctgctgcaatggctgctgcaacggctgctgcaatggctgctgcaatggctgctgcaatggctgctgcaacggctgctgcaacggctgctgcaacggctgctgcaacggctgaatctgctgcggatagaaatagcccattggctgctgctggtacatattttgatatggctgcgctctccattgcatgtgacattccccctatacctctcactaagttttcttctatatatgtatgaattccgccttggttatgtgctttcggagagcctcatctttgtcaaatgctgtcgaaagtcttaattttttaaaaacagaaaaaagtcgaatcgttatgttaacataatctcaacatacatgagaggggatgcaccattatgaacgtatcatacttaagaaaacgttttgcagaagtgaaaaaatatgaaacagattgtgcagataaactgatggactttgcaaagtttctctatattcaaggccatctcacggcaaccgaatttcgaaacagtatgaaggttctcgaagcaagtggagcagaaaacccggcgtatgaataacatacccgccccctttatataaaagaaggcagctattttcagctgccttctttttcaatttcatcccttagtatacgaagcgtatataaaacagattcagttaaatccttgtatctttttttatgaatatgatgaacatatgattggagcatcagctctccgaaattttctgtaacggcctgaatttgtgcatgatgaacgtatttcggacggttttcctgaataaacgcaagcgctgcttcagtccaaaacgcgcaaagccggtcttttttttcaacgtcaggtttaatgatgtcaaaaaaatcatatgaacggccggtttcttttccttcctgatacctactttcggcttcaagagccgcctctatcatttgttctgtcagttccaataacgactgtgtctgcaaacggactcacctcagtacatatcgtaccaaagatttcgcacaaaatcagctaatccggcaggctctcggcaaatctttacgccggtcaggcaaaaacagatcatcaatacaaacatgaagctcgcgggcctcttcctcaaggcgggcaagccgttcctgcctgatttcttcagcttccgcctgacaggacttaactgccttggtaagtgtcttttcagcggcagaaatccggacttcgatatcagaaagcagacggagaatatcggccttactcgtgtaaacagacattcatgttcctcccttttatcacttgcgtctctccgaatataattctcgtttttataccgctctcctccgcacatgacaaaactagaaggagttcggcaaacaaacagagattatcctaaaaggcggacttttcgacaaaaaagtgccgcaaactttgtatgaaccggcacgttaatgcaaacgatacagttgaggaggtgccgtatgaaaacgagaccgaaaaatgcaggtaaacagcaaaaaaatgaagcaaaaacaactgatacgcttgataaaaaattaggcggcccaaaccgcccttccacgtaagacaccagagcccgaaaccgcagcgaacggtttcgggctttttcatttcgtcagccactcttttaccgcgaaaagcgcatggagctcacgtcttttctgtaaataccagtcggtcagttcaagctgttccggcattttctcctgtaaaaaagcccctttccataaccttttttgaaaccaatccgtttttttgccgtctaatgagtgggcaacaatgggataggttgtcctcagcatcggtgatgttctttttttgatgccgatcattttctccatatcaaagcgagagccggtatgaggaacggtatcaagaaatcggtaaaaagaagcgtgaagatcagggctgaacaaaagacgggcaagctgttttccgagcgtaattctttcttccgtttttgagaaccgtttgacggaaattccgtataaacatccgtcaaatgagggaaatatcaccgtattaaagtgaaaccaatcacttaaataaaaaggaatcgtgccaaaaacattctttttaaacgaaggattttgtataataggtgcttggatagtgttttgttcatttataataagagcatacatgagccgttccgtatctccgtcacgccaaaaacggagccattcttcctgcataaaagccgagacgcggaaataagggagatggcggaaaagaggttcgccgatttgttttgaccactggtagaccagaagctgaggataggcatcagaaaaaataagccaattcgccctttcatacgaaaggaaaaaccagtttttctgcctgctgtcaaggccctcctggtagagaatgcctcttaaatcagtcatcgaccagcccgcattgcgggacacaaaggatgccaaaagcgaccacttgatctcagggtggcggtcataatatgctttataggcattcgtccgggaaacgttatcggcattttttcttttcgtctctttttcaatctggcgaagaatggcggttacggtctgtcgtttatgcacgttcattcacttccgtcactattagtttgataaggaggatggaaaaagtgattcggtatccgaatggaaaaacttttcagccgaacaaaacggtttcatcccaaaacagccagaaacggtcccattcatacagtaatcgcggcatgaccctcgaagacgacctgaatgaaacgaatcaatattatctggctaaccaaattgctgtcattcacaaaaagccgacacccgtccagattgtaaacgtccattatccgaaaagaagcgccgcagttattaaggaagcttattttaagcagtcttcgacaaccgattacaacggaatttataaagggcgctacattgattttgaggcaaaagaaacaaaaaacaaaacggcatttcccctgcagaattttcatgatcatcagattgagcatatgaagcaggtagtcaggcaagacggcatttgttttgttattatatccgctttcgaaaaggtttatttcctcgaagctgacaagctgtttgtcttttgggaaagaaaggagaacaacggcagaaagtcaattcgcaaagacgaattagaagatgcttcctttccgatttcccttggatactcaccgagaattgattatattagtattattgaacagctttatttttcgcaggaacagtagactgagcgaaaggttgattaacgaaaggttgagatgttatgtcagatcaatttaagagccgtgaagaacgccgaaaggcaaggcagacgaaaagccccaagccttcttcaccgaaaaaaggcaagaaacagcgtaaaggcggtttattcaaaaagattgtactgtccttggttattctgtttgtcctcggcatagtcggcggagctgcggcatttgccgttttagtttccggtgcgccgtctttggacgaagccaagctgaaaacgccttactcttcaacaatttacgataaaaacggcaaagaaatcgcggaagtgggcggcgaaaaacgaacctacgtcccgattaaggatatacccgatgttgtgaaggaagcttttatcgcaacagaggacgcccgtttttataagcaccacggaatagacccgatccggatcggaggcgccttggtcgccaactttacggatggtttcggttcagaaggcggaagcacaatcacccagcaggttgtgaaaaactcgcttctgacccaccagaaaacgattaaacggaaagctcaggaagtatggctttcactgcagctggagcgccattattctaaagatgaaattttagaaatgtatttaaacaaaatttatttctcaccgcgcgcctacggcgtcggtaaagccgctgaagactttttcggcgtgaaagatttgagcaagcttacggttgaacaggcagcaacccttgccggaatgccgcaaagtccgaccggatacaacccggttaaaaatccgaaggcttctgaaaaacgccggaacatcgttctcagcttaatggaaaaacaaggatttatctcaaattctgaataccaaaaagcaaagaaagtgtccatgaaagatgaaggcgtcgtcagccaaaaggaatacgataaaaaggacacaaataaatacagcgcttttgtcgaagaagttatgaaagaaattgagacaaaagaaaagaaagacgtcgatatttcaactgacggattaaaaatttacacgactcttgatacgaaagcacaagattatcttgatcaattgatgaacggcgacacagtcggctttacccaaggcatgcagggcggcgtcaccctccttgatacgacaaacggagaaatccgcgccatcggagcaggacgaaacagaactgccgggggatttaactacgcgacagacactcaacgccagccaggttcaacgataaaaccgattcttgattacggtccggtcattgaaaataaaaaatggtcgacgtatgagcagattgatgactcagcctatacgtactctgacggcactccgattcatgactatgacaataaatacagacaaatgataacaatgcgagaggctctctcagactcacgtaatattcctgctctgaaggcattccaagcagcaggtaaagataatgccgtcgacttcgcaaacgacttaggactaggattaaacaaagacagtgtaacagaatcttattcgatcggcggttttggagctgataacccgggcgtttccccgctgactatggctggtgcctacagcgcttttggaaataacggaacgtacaatgaaccgcacgcggtcacatcgattgaatttaatgacggaactaagcttgatttaacaccgaaaccgaagagtgctatgagcgattacacggcattcatgattaccgatatgctaaaaacagtggtgcagtcaggaacgggtaaactggctcaagtaccgaacgtggaagtcgccggtaaaacgggtacgacaaactttactaaagaggatattcaaaaatataacattgctccaggcggagtaccggattcatggtttgtcggctacacccctcaatatacagcggcggtttggaccggtgttgagtctggtaacaaagcaggtaaaaaatcattatcttatgcagaccagcaagttgcaaaacggattttccaaaagctgatctcctatgttgatgacggtaaaggaagcttcaagcagcctgacagcgtcgtgaaagaaacagttgagaaaggctcgaaccccgccgctttagccggaccgaatacgccggatgataaaaaagtgacggagtacttcgtgaaaggaacggagcctactgccgtttctaaaacgtacaagaaagaaaaagccaataaaccgacaggcttgcaagtgaagtacgacaaagacaaaaaatcattaaacttaagctgggattatgatggtgatgcaacattcaatgtcaaacaatctgttgatggcggaagctacagcgacattcaaaacagttcggcaaaagaagccgtcgtctcagatgtcacccctgggtccacatacagcttccaggtgacagcggaaaatgatgacggaaagagcgatacggcatcagcatctttcaaagttccgaaagatgaagaagacaatgcagataaagataaagcgactgacgatgaacagaaacctgatgataaggataaagacaagacccaaaccgatgattcaaaaacggacgacaatcagacggatacgtcagacggatcggatcaaacacctactgatgacccgaataaaaatccggatcaatccaatcaggatcaaacggataataacaatccgaatcagcctggtaacgggacggataacaacggacagcaagataacagctctgacaatagttccgataccggttcagatggttcaaaaaatcctgacagcggccagaaggataaaaaccaagactcatcttcaactgtcaacggccagtcaaattcgtcaaccatccagtcaaataccgctaattagcgtgcgaaatccttcacctcaaacaggtgaaggattttttcatgcaaaaaaacctccttaagagaaaaggaggttttttataatttgttcatgacttcatatttatgatattgctttttcatctccgtcattaattcatccagctgaataaacgagtgaaattgagtcggttttgttaaaataaacgccattctctccgcccaattaatcggttccgcgggaaaatgctttgtttcaaggacagaccaatcgagtgatgtgacccgctcccctgccgtccaatgaaaagcggcaatcagacagacgatccctttcagcatgtcgttttgatcacatctcgatttccttgtttgaaaaacggggagcagcgcttctttcgtctcgttccaaatctgaaaaagaaacggaacatattcactcctttccctccatggctgcactttcggctggccgctgaaatccatatacagcggatggcggcgcagcaccgttttgatctcgaggttttccagatctgtaagactgcgcaggtatgtttcatagcctgccagaatgtcaatcgccgtcaccgtttcaccagtccttttttgtcacgcttctgcccttccctgcatagcgaaagcaaaggacattccgcacagcggggggattgcgctttacaatgatagcgcccgaaaaatattagtctgtgatgtgtgacagaccaatcctctttcggcacttttttcattaatgttttctctacttctaatacagagtccttccagcggcagatgccaagccgtttcgagacccgttccacatgagtgtctactgcaattgcaggtacaccgaaagcaacggacacgaccacatttgccgttttccgtccgacacccggcagcttcacaagctcatctcggtctttcggcacttctccgccgtactcttcgataatcattttgctcagcttttgaatattcttggctttatttcggtacagtccgattgatttaatatcctgctggagttcttccagcggtacggccaaataatcttcgggccgtttatatttttgaaatagcgtttttgtcactctgttgacgagagcatccgtacattgcgcagataaagcgactgccacaaccagttcgaaaggatttgaatggacaagttcacattctgcgtgcggaaacatatcgctgattttatcaagacaatattcaatctgctttaaatttaacacgtttctctccttctcatgttactgttccagccaattgtaaaaaggcacctgcctcgtatactctttttgcggttcattttgtttcgtttgaacgcgccggaatttttggctgtgcgccttcgcctgctcaaccgttttgaagccgttctttttccattcaaataaaatccggtcaatatagcgaaaactgagctttcctgataaaacagcttcttttaacgcatgtttaatcaaaatcgcatcatgctgatcctggtcctgccatatggccagcgtctcacattcaagcggagacagcggtcttccgaattcttcttcaaagatggtgtacaggcttttttgctctctttctgacgttctttcctgcgtttcgttttgtgaatgctgaatgtaatcatacagcttcgcccatagcggctgcagagaatatttttcgaactttatgccgttatgatcttcacattcttcaatgaacagaaagcctttttgaatgaacattctcagacagcttgtacattcttcagcagaaatggacatgcctgattgaagttcaaacggcgtcggaaaataagagcccttttccaaatgcattttaatcttcaaaagcaggatcaattcggtttcattcagcccgagctgccgataatgtgtcagcagcaggttagggatgcttgaaatgccgagttcctgcatatctataaattgctgttttttcatgcttacacctcttactgtaaaaggttatctccgggagctttcccctttacttagaaaaagtctcccttacaggagacttcgttttttataactattacggatacagacggttcagaagtcttgggaacggaatcgtttcacgcacgtgaggcgctccgctaatccaagccactgtccgctcaagtccgaggccgaagccggagtgcggaacagaaccgtattgtctgagttcagcataccatttgtacgcatctgaatccagaccgtgctcttttaatctttcttccaataaatccatatcatgaacgcgttctgaaccgccgatgatttccccgtagccttccggagcgatcaagtccgcacataacacgacatcgtcacgatctttagcaggctgcatataaaacggttttaatgacgtcggataatgagtgataaacaccggtttgtcatagctttccgcgatcgctgtttcatgcggcgcaccgaagtcatctccccattcaatatcgtcgaatcctttttctttcaggaattcgatcgctttatcatacgtaatgcgcgggaacggcgctttgatttgttcaagcttggacgtgtctctacctaatgtgttcagctcgatcttacaatttttcaggacgctttgtacgatataagcaacataattctcctgaacttcaaggttttcttcaaattcgacaaatgccatttcaggctcaatcatccagaattcgatgaggtggcgtttcgtttttgatttttccgctctgaatgtcggtccgaatgagaatacttttccaagcgccattgctgcagcttccatatacagctggccgctttgagacaagaaggcgtcttcatcaaaatatttcgtcgcgaacagctcagtcgtgccttcaggagcgcttcccgtcaaaatcggcggatcaactttcacgaagccttctttgttgaaaaattcgtaagtcgcacggatgatttcgttgcggattttcataatcgcatgctggcgtttcgaacggagccataaatgtctgtggtccattaagaattccgtgccgtgctctttaggtgtaatcggataatcagtcgcttcgtgaatgacttcaatggacgtaaccgcaagctcatagccaagcggtgaacgctcgtcttcttttacaatcccttttacgtaaagtgacgtctcctgcgtcactgattttgcgatttggaagatgttttcttcaacttcagctttgacgacaactccctgaatgaagcccgtaccgtctctcagctgtaaaaatgcgattttaccgcttgagcgtttattcgcgacccaagctccaatcgttacttcctcgcctgtgtgtttatacacttggttgattgttgttttcaaaatctttccctccagaacaagaaagacattcaggaatctgcctgaatctcttttttcatcactttattatacccgttctactcttacggggtcaatgcagatgaaaagcggcttcaaaagccgctttttcagaatcagctgtgtttttccgtaaagcggcggattctctcgaccgcttcttctaaaagatcaagtgacgttgcgtaagataagcggacgttgtctggtgaaccgaagcccgagcccggcacgatggcgaccttttcttcttccagaagcgccttcacgtattcatcgacatctttaaatccgcagttttctgctgccgctttggcgttagggaacaagtaaaacgccccttcaggcttgacacaggtaaatccgggaatttcactgagctgagcgtaaatcgtattcagtctgtgctcaaatgcctgcctcatctcttccagcggctcagccggcccgttgtatgccgcaatggcgccgtattgagcgatggacgtcggatttgatgtgctgtggctcgcaaggctcgtcatcgctttgataatcggctcggaaccggccgcataaccgattctccagcccgtcatgctgtgggatttcgacacgccgttaatgatgatcgtctgctctttcaatttatctgaaagctgtgcgattgagacgtgtttttttcctccgtatgtaagcttctcataaatctcgtcagaaacgatcagaatgtcatgctccaggcacacttttccgagttctgcaagctcttctttcgtatacatgacacctgtcgggttgctcggtgagttgataatgattgctttggttttctccgtgaccgcctgcttcagctgctccggtgaaattttaaactgattggactccaatccttcgatatagacgggacgccctcccgccaatttcacctgctctggatagcttacccagtaaggagtcggtataatcacttcatccccttcatcgagaatgacctgaaataacgtatacagggcgtgtttcgctccggtgcagacaatgatttcagacggttgatattcaattccctgatcatttttgaatttttcagcgatactgtctttcagcgccggcagaccgccagaaggcgtatatttcgtatgtccttcattcatggaacgcaccgcggcatctataatgtgctgaggcgtattaaaatccggttctcctgctcccaggccgatgacatcatggccttctgctttcagctgtttcgcttttgcggtaattgcaagtgttgcagacggtgttaatgcggatactctttttgccaatttcaacttgaactccccctaatacgtctcacggtgtgatgtttttgagaatcttgccgcttgtaaagtccacatagctaaaactatattgcccgtttttgttgatgtaggtcacttcccacagcaggacatcattttctctcgccaggtggacgtcattcagcttggaaacaagccctgcgtcctgaacgatcttggcagccttgccgcttgaaatgccgtcactggcttttttcgagagaatttttgcttttttgtcggccggaacccatacatacatgtcttttccttgtttatccgttccggaaacaacgtaatacttctgtttgccgacaaaggtttccactttctcagcatctgtcagattcgttttttctttagcggcagcggcagctgtttcgtggccttcttctttttgagccattgcagatttaaaaatgctggccgaaaataaaagaactgctaaaaaaataataccaaatacggctgtaaatattaatgctttttttctcatcttttttcacctatgtgcgataaatggtgaagaccgcttcattttgattttcttcgtcaagcgcaagtccgaacatcagattgtcccttttcaaagtccggtttaatgtatcgacgattttatataaatcatccgaatgctccacattaatcgtagaaagaatctcaattttgctttccatttttataccctccatcggtcgaacaaattttgttagtcataacgggatacacgcgcggcataataaaatcacaaggcggcatgaacccgcttttactatataaacaattcctcatcccacaccacgaaagccgcgtttatgcggcttttattccgtttggctgacgtaatctgcgagttcgtcatccgtcagttccaaaagggatgacgtcgggagcgcttcaagaaacagccgtccgtacccagccgtcttgacacgctgatctaacagaacgatcgttcctttgtctcccgccgtacggagcaggcgcccgattccctgtctgaacgttaatacggcctcaggcagagaaatggtctgaaacgggtttttcccctgcttcttagcgtattcgcattttgcggcatgaagcgggttatcaggcgcccggaaaggaagccttgcgatcatgacggttgacaattcatctcccggaaaatcaacgccttcccagaaatgattcgtcccgagcaaaatcgcccggctggccgttttaaaggttttcattaatttaccgggactcccgcccgagatgccttggccaagaagctgaatgcctgagatctccatactgagtttcaattcctgatacacttttttcagcatatcatgagatgtaaacaggataaggatcttcggctgttttccctttgacatgatttctgcatacttagcaatatgctcaatgacttcccgctctccgtcatatttgacggatttcatttctttcggaatgatgacgttcatctgatcatcataagaaaaaggagacgggatgcttttggtgcgcggataaaagtccgaaagtcccagcctttcaatcataaattgaaaagactgctccaccattaaggtcgctgatgtgagcacaacgctttttttgcgggcgaaaaactggtccgccagcatttcaccgggctccaggggctgtgcatagatgctgacggcgttttttgcgcctttcgcatcaatttcaacccaaacggcctctttctcatcattttcaaacagcagccggctgaacgtatcacggtattctctcagccctctgatacactttacatattcggccgctaaaaaagccgctccgcttttcatctcatcaagcttttgatgtaacattttctcctgtacggaaaacaagtcgagcagctgatcaagcatcgcacaaagccgctccgctccgtccgttatcatgaaaagccctttatcctggcttttatgattcagactatagacgagacggttcagatcgtctttaggttttcttcgtttgacaaaagaatgcactgaactgaaaaatgcgtcgctttcagattgaatatgcttcatccactcatcggcgtcaaaaaaactttccgccggcaaatcatacgtataaaacagttttgtcatccgctttaacagcccgtgttccttcaacgttccgattcggctgagctttgtgtgcaacccgatgtatgaagctctgcgtcctaaatgctcgctggcggcgcgttcgaaatgatgcgcttcatcaatgatgaccgttccgcttgcaggcagtttttttgtttcactgctttgatctgaaaacagcaaagcatggtttgtgataatcagatctgcggcctgcgctttttctttagcccgttcataaaatccggcggccgattccttcccttttttcaaaaaagaatcctcatcataagacatgcgctcccacagcaatctcccgcccgaaggaagattcagctcagctgagtcgcccgtttcagtctccgtcagccagatgagaagctgcgccttcgtcagaaccgcatcatagttgtcatcttcctcatgcagaatatgttcaaacttgcgcaagcacagataatgcgattttccttttaaaatagcggcctgaaccggccaaggaaacatacactccaaaagcggaagatctttagacatgatctgctgctgcaaaagagtagagtacgtgctgataatgacgggagtttgttccgctttggcaaataaaacagccggaacgagataaccgatcgtttttccgatgccgggcgccgcttcaataagcgcatgctcccgattgcggaaggcaccaaggacttcatccatcatcgaaagctgcccttcccgcctttcatagcgggggatgatgtcagataagagccgttctttttcttcgttccatttttcaaggtcaatggcagcgctcaccggccgggatgccgggatttgttcgggctctttaattgaaaaagaggcatatggaatgcagctctcttctgccgccggcctgttttcatgaataaaagaatccaaaagcagcgtcaaatcgctgataaaatgctgtgaaagccttctaagctgctttaacgtcggcaaaggcagatgtttcagtttatgtaaaatgtctaaaaagatcagtcccgtaacctccgcatcactgtctgcgcggtgaggccggtcatgaacaatattcagctccgcgcacaattcaccgagcttatacccttcaaatcccgggaaaacaatacgcgagagctcaaccgtatcaagcacttcgcaatccgtcagctcataacccgcttcgctcagttcatgccggacaaatccgaggtcaaaatgaatattgtgcgcaacaaaatacgcgccgtcaagcagatgaaaaatctcttctgcgaccgcttcaaacggcagttcattttcaaccataccggttgaaattccggtcagctgttcaataaacggcgggatgtcctgattcggattgatatattttgaaaaccgctcagttatttgtccattttcaatgacaaccgctgcgatttgaatgattttatcgccctttttcggcgaatttcctgttgtttcgacatctatgacaacgaaccgttgcttgttcattaaaatggacacctcaattcttgcatacgagaaaagtgtaacacgttttgttcagaaatggagcggaaaaacagcttttgcccctaaatcttaaaagaaaacccccatgaagggggctcttttacaaaatcgtgtgcgccggctcctggcccagcatctgctcgattttattctgatcatcaagcaccgccaccttcggctgatgggtttttgcttcctgatcagacatcatttgataagaaataataataactttatctccctcttggacgagacgggcggcggctccgtttaaacagatgacgccgctcccccgtttaccgggaataatatacgtttcaagtctcgctccgttgttattatttacaatttgaactttttcattaacgagcattccgacggcatccaaaagatcttcgtcaatcgtaatgctgccgacatagtttaaattggcttccgtcacggtagcgcggtgcagttttccggccatcatagtacggtacatattatgatctctcccattcatcaatatcaataatgatattatcaatcagtcttgctttagaaaattgaacggcgcaggccagaatgatcttcccgtttaacgtttcaagcggagtcagctccggataagcgtacaattcggcataatcaatgacgccgcttgtgttttcgatgatgccggtgacggcttttatgacgttttccgggtttctttcaccgtctctgatcagctcggcgccttgttgcagcgctttatagatcatcggcgcttcttttcgttcctgctcagtcagatagacgttgcgagagcttttagcaagcccgtcttcttctctgaccgtgtccaccgcaaccaattcgatatccataaagaaatcctcaatcaatccgtccacaactgctgcctgctgggcatctttcaggccgaagtaggcgcgggtcggtttaacgagattgaaaaacttcgtcaaaacagtagccactccgtcaaaatggccgatgcgggaggcgccgcataacacgtcagttcttctttttacatgcacggcaacattttgctcacccttatacatgtcactggcagacggcgtaaacaatacatctgcccccgcctgttccgcaagccgggcatcgcggtttaaatcacgcggatatgcttcaaaatcctcgcccggtccgaattgagtcggattgacaaagatgctcatcacgacaatatcgttttctttggtcgctttttcaaccagcgtcagatgcccttcatgaagaaaacccatcgtcggtacgaatccgatcgtccggccttctgagcggtattgtgcaatcagttctttcagctgttgaatttctgtcacttgtttcatcgcttactttcctccgtacaagccttgcagcacagtttgattcagctgaaaggagtgcttttcttccgggaaaacccgttctttcacgtcacggacgtaaccgctgagcgcggactcaatcgtcccgtcgattttggcgtattgcttcacgaacttcggtgttctgtccacgccgtggccgacgacgtcatgataaacaaggacttggccgtccgcttttgaaccggctccgattccgataacgggaatggatacttcttcttttattttagctgtcagttcagcaggcacacattcaaggaccagcatcatcgctccagcctgttcgcatttgatgctgtcttcaatgagctttttcgcgctttgctcatcttttccctgtaccttatatccgcctaatactccgacagactgcggtgtaagccctaaatggctgacaacaggaatgccgccgagagtcagcgcgcggatggattcaaaaacgccgtctccgccttcaagctttaacgcgtcagcgccgctttcctgaataatggccgcggcgtttttcaatgtatcctcttttgaaaggtggtaagacataaacggcatatcagttacgataaacgtatttttcgcaccgcgtttgaccgcttttgtatgatgaatcatgtcactgaccgttacaccgacggttgaatcgagcccgagcacgaccattccgagcgaatccccgaccaaaatcatgtcgactccagcctgttccgcgagcttggcctgcggataatcgtaagcggtcagcatcacgatcggctcttcgttttccttcattttcataaaatccagttttgttttcattctgattctcctcctctaaacggtgaggagatgagccgccaattctttgcaagcaaaaaagccttctgtaaaataagaaggattcccacttgtttaacgttcggcgaatgtcatccctctgtcccagtccttttttggatcaaggcagacttttcgtagtctctgttctgctgatcaggtgcagttcattatgatactgcccataggaagtataccaaattcgcgagacttgtaccaactaagattaattgagctcaatatcagcagaatatattttctttatgccgtctttcgtttccaagagaagaactccttcatcatcaatgccgagcgattttccgtaaaacgtcccttgcagcgttctcgctctgagctcgttccccagtccgactgcgtaactttcccataacagcttgatcggtgtaaagccgtgctttaaataatcctgatagcgtttttcaaaagtcagcagaatctcttgtatcagacccgctctgtcaatttttccgccggcctccaggctgagacttgtcgcaatttcctgaagctcgccgggaaaatcggtttcctgctggttcacattgataccgatcccgagaataaccgaacggacacggtcttcttccgcttgaagctcagttaaaatcccgacggcctttttaccgtgaatcattaagtcattcggccatttaatggcgggctgtacaccggtaaaggcctcaatagcctgtacgaccgcaacggcagataacagggtaagctgcggcgttttttgcaacggaacgtccggtctcagaatgaggctcatccatatcccgtttccttcctgtgaatgccacactctggacattcttcctctgcctgccgtttgtttatcggcgactacgagcgtcccttccggcgcaccgtcattggcaagttcatgggccgttttttgggtggacggcaggacgtcccggtaatacagctgtttgcccaaaacctctgttttcagcccgaaacggatttcggattcactgagttttcccggctttttgatgagcctgtaccctttccgcctgaccgcctcaacctcatagccctctttgcggagctcttctatatgtttccaaacggcagttctcgaacagccgagcgcgtcacttattttctgcccggagataaagccgtcgcccgcctcagaaaataaatcaattaattgggttcttaatgttgatcccatgatgcgagccactcctttatgtcatgttttcggttggggagctttcctgctaataccgcttcttcaatccggctcagttcttcggccacccatttacccgcgcggcggtttctgaactccatcagatcagcgcctgaaatgtcgaggtcacggagacttttgatcggcagctgctcatagaggctctgaacctctttcagcttttgttcatcaatcgtcttatgctttttcagcattccgattttaacagctgaaaacagcgcctctcccgcccggtacatcgcttctgcttccagctgcgccggatacacgcttatgatccgcaccgctccttttatgacttttcccggcagtttccattgttttaaaaacggctcggcgtttttcggactaagaccgagaaataataacagcgctgcccagcgttcttcgcgcgcatccaaggaagaaaacgaaaattcacttgcttcgagcatttgctgctcataaccggaaagaccgggcagctcctgtatcagacccgtctgcaccatcgtttgaatcgcttcatttgaggatgtgccaaggagaagcttttcaaactcgacggtctttcgttctactgatacgtgcgccaaaagctccctgtcttttatgacggccttttttgttttttcctctaacacaaagccgagctggctcataaaacggacggctctcatcatccgcagagcgtcttcccgaaaacggtcttcagggtttcccaccgtacggatcagctttttcccgatatcgtgagcgcctccgaaataatcaagcagctctccttcggcagacatcgccatcgcattaatcgttaagtctctccgctttaagtcttctgataaagaagtaatgaaccgtacagcttcagggcgccgataatccttatattctgattcggcacggaaggtggtaacttcataggtttcatctttccataagacaattacggtgccgtgttcctttcctacatcgacggtccgctcaaagaggcgctccacctcattcggcgaagcgctggtcgcgatgtccacatcacctatttttcgtttcatatagctgtctctgacggctcccccgacaaagtacgcctgatggccagccttcatcagatggtgaagaatggggagggctttgacaaattcctgttccataaaatcactccggtcctgccaattcgtcataaatccgttcatattgactgacgattctttgcgaagaaaaggcggtctccaccattttgagcgcatggtcagtcaaacgtttgctgagctgtttgtcttctaaaatcgcaagcgctttttcagaagccgcctgaatatcgccgacttccaccagaaaaccgcttacttgatctttaatcacttccggtatcccgccgatattagttccgatgcacggcacgccgcaggccatcgcctcaaggagaacgagtccgaaactttctttttcagacagaagaagcttaaggtcgctgatggaatacagctcttccaccctgtcctgatttcctaggagcagcacttgatcctgcagaccgtatttctcgacaagctgccaagcgacgcacttttccggtccatcgccgacaagcagaagctttgcctttgttttagctgcaatattacggaaaacacggatgacatccttcacgcgttttaccttcctgaagtttgaaacatgaatgacgactttctcatccggcaaaataccgtgtttctcttttatactctctgtatttttcttaagataaacacgttcatcaataaagttgtaaatggtctcaatttttttattcggcttaattaagtcatatgtttcaccggcaagcgcggttgataccgccgtcactctatcggacgattcgatggcaaaacggattaaatcttttagtgacggatcatatcctaaaacggtgatgtccgtaccgtgaagcgtcgtaacgatcccgatgtcgcgcttgagcatctgtttggcgagataagcgcataccgcatgcggcagcgcgtagtgcgcgtggatgatatcaaggttttcccttgcggcaacctcggcgattttgctcgccagcgaaaggtcatacggcggatatttaaataccgcgtattggttgacctccacttcatgaaaatgaatattcggatgatatgtatttaatctgaacgggatgcttgatgtaatgaaatgaacctggtgccctttttccgcaagcagcttgccgagttccgtcgcaataatacccgagcctccgacactcgggtagcatgtaatccctatttttaatggtctcattgtccgcccccaaaaacatcatcattcaaaacgggaagctgttttgaaaagaaaccttcggcgtaccccgtcccggcttctttgccatacagtctttcccgcgcttccaccatttcgatataaccgtttgtcagcggtgtgttcactgactgcgccgtagaaataaactggctttgataggcattcaggctttcctttttcagatcgatggtttccgttatgtcgattacaaagtccggacggtgaaatccattgatcatataatagtatactttctgagctttgtgagccggaagttgctgatggtctttgtatttatgaattcccgctgagaacaccgcctcttcgaccaatgccgcagcattgccgtggtctgggtggcggtctttcggataaggcatgaaaacggctttcggccggcaggctctgatgacactgacaatcctgcaaatggcatcttcacttttcaaaagcccgcggtcgggaagcgtaagctggattctctcttttacgccgagaattcgggccgcctccgccgcttcttcttttcttatacttaccgtcccgttagatgataattcagcctcggtcaggtcgcatatcaccgcggtttttccttgtgccgtaaattttgcgatcgtgccgcccataccgatctcgacatcatcgctatgagcgccgaacgcaagaatatcaacgtgttcaggcattcggctctcctccgcgcacaagattgcggaaatcaaacgccccgccgtccagcgtacggacgaggatttccgctgttcccatatttgtggcgagcgggatcgcgtatacgtcacacagccggatcagcgccgagacatccggttcatgaggctgcgcagttaacgggtcgcgcagaaaaatgacgagatccaaggcatttgccgcaattaatgcgccgatttgctgatctccgccgagcgggccggattgaaaacgttcaatggacaatccggtcgcttcctggattttcaagcctgtcgtacccgtcgcgtataactcatgatggctcaatatatctttatatgcggtcgtaaactgaaccatatcctgcttttttttatcgtgagcaattaaagcgattttcatttgatgttctcccccttgccgattcagtcgataatattttcgagtccgtatacaagctggtcgattttcatcacttgctctactgacagcttcactcctgacataaaggaagcccggttataggagtcgtggcgcagcttcagcgtctggccgtccatgccgaacatgacttcctgatgggcgataaggcccgggagacgcacactgtgaaggcggattccgtttaattcggcaccgcgggcgcccggcagaatttctttttcatctggatgaccctgctgcttttctgaacggacatttgagatcatttccgcagttttcagcgccgttccgctcggtgcatccagtttttgatcatgatggagctcaatgatctctacatcttcaaaatagttggcggccatttgtgagaatttcatcatcagcaccgcgcctaacgcaaaattcggggcgatgatagcgccgatccctttttcttcggtgagagcgtgaagttcctgtaaatccgcttcagaaaatccagtcgttcccacaacagggcgaacgccgtgttcaagagcggctttcgtatgttttttgccgatttcaggcgttgtcaaatcgatcagcacatccggttttgtttcctggaaacatgcgcggatatccgtatagataagagcgtctgaatcagctgacatcacttcccgcaatgtttgctgatcgtatgtatggtcaatggcgccgacaagctcaaaatgaggcgtgcggacagcaagttttacggcctcctggcccattctgcctctcggtccggcaatgacgactttaatggtttcatttgacatggtttctcctactttccttcttcttttctcgtccagcggtctttatcccgtgtattaaatttatgcatcacgcggttatgagcttcctccaatgaaatatcaagggagttggcgaggcagatcaggacgaacagcacgtcgcccatttcctcttccatgcttttctcattttccgtcgttttcttcggcttttccccatagtaatggttgacttctcttgcgagttcgcccagttcttcggtgagacgggccatcatggcaagcgggctgaaatagccttctttgaattggccgatatattcatcgacctcagcttgtaagtctttcatcgttttgtcactcactgtgcgaatacctcctgtcatctcttccatgttagctaattcaagtacatttgacaaatgttaaaaacggcagtttgctgttttcttttgtatccactataatatttacgcaatctaatggaaggaaaaggggtttgatgcaatgcttggagaaatcagaatcaaaaatatttgctttattttaatcggcgccgctgttttttcattcggactggttcactttaatatgcagaacaatttggcggaaggcggatttaccggcattacgctgctcttatatgcgttattccacatcagcccttctatttccaacctggtattaaacattcctatctttttcatcggctggcgcatgctcggccggacgatgtttgtctataccctgatcggcaccgtctctctttccgtttttctgagtatttttcagcgttacgaaattcatatgccgctgtcgcatgatttagctctggcggccttgttcgcgggtgtatttatcggcgcgggtctcggcattatttttaaatacggaggcacgacgggcggagtcgatatcatcgccaggctgatcaataaatttttcggcatcccgatgggccggacgatgtttgcctttgatgcctgcgtcattctgctttctttgtttacgtatctttcttacaaggaagcgatgtacacgcttgtagccgtttttgtcgctgcgagattgattgattttatacaggaaggcggttatgcggcaaaaggcgcaacgattatttcttcgaagaacgatttgatccagcaaaagatcattgaagagatggagcgcggcgtcaccgttttaaaaggacaaggatcatatacaaaggaagacagagacgttctttactgcgtcgttccgaaaaacgaaattgtgcttttgaaaagcgtcattacttctgttgacccgcatgcttttgttgctgtaagcgatgtccatgatgtgctcggcgaaggatttacgcttgatgaaaataaaaatccgatcagacgataataaaaaggcggctcttgccgcctactcctcgtgtttccatttgacaaccggtgattttttctttctcaaccggcgggcgaatgccgggctgacattgagcgtctgctcgacaaagcgctgcggcgtcagcgccagccattggtttaaggagatgtcctcgaaacggtcgcttttgaaaatttccagaaagcgaagcacggtgtcaccggtattctggacataatgacccatcgcaaaaggaacatatcctacgtcacccgcttgatagttaaatgtccgcgctcttccctccgccgcaaacaccgtcatttttgcttctcctgaaagataatactgccactcgtccgtattcggatgccaatgcaattccctcatgcctccgggctcgacttccacaagagcggcggcaatcgtttttgacaccttaaacgtttttgaatcgacgatctttacttttcctccgctggtaacaagaggttcctgcagtgaaagcttgtagctgaacggttccaaaacggtgccttccggggaagaaactgctgcctgttcaatagggggaggcggttccagctggaacatgtaacgctcttttgcagggatgtaagccaaatcatatcccgaaacaccgaaattcgcctgcagcacgctgcgcggagtatgagcaaaccagtccgttactgaaaaggtgctgttctctgaaaaagagccgtcatcaaagacaagcaaaaactcactgccctgctccattccttgaatggagtgaggaatgcccgaaggaaagtaccacagatcgccctcactgacgttatcaataaaattccgcccattttggtcgaccgcggttaaacggacttctccgcttatcacatatccccattcggcttctttatgccaatgaagctcccgcaccgctcccggtttcagtctcatgttcaccgccgcgatgtttttggacaccggcagttctctgaccgtcacctctcttgaccatccgccgtcttcaagcctcatatgcgtatcagaaaaagagaattttaagttttgaaccgttcctgcatccgttgagggcggaacgagcatgtcaggattctggaagtcacgagcgaggtttcgcggtccttcatcagtcgccccttttctgcctctgatcggctgcgggaggtgttttgaagccaattgctggatgagttttttcaccttctttagctcctttacagcaatttgtgtttatttagacttaggatattcacgctttttctctttctttttttccgctctgtattttcggtagccgacatatgtcagcgcagtaataatgataccgcctgttgtcagaatgacccagagcagcgaaggatcagcgtcatcccgttctaccttgtcaaataccttttttaaatccttctggagaagcgtcagccgttcaagctttgttccttttgtcatctgctgaaacccttcctgctcaatcacctcgatatgtttcgccaccgtatcaagctggccggccgacacatccattgtcaggctgggataaattaaatcatataatgatataaattcattccacttttcattgaaattctcacttccgttcccgctgacatcttcttttaaggcgctgaatgtagccataatcggtcgttcaagcgaaccccacagcggatcggagtgatcttccatcgcatccattaccagcctgaactgggcggctgcccgtattttttcggtatttgaggcatctgcctgtttcaagacccgcactaaatcattgtagcccagagtcacctgcctgacttcggcgccggtcagtgagtttacgtgtgtcatttttttcttaaagtagccaagcacttgcagggcctcatcatactgcgaatgccgcgtcatttggaaaacggtatccgaaaggtcgttcagttccttgagacccccctcaccttcagctttggcagttgtgatgaaacacataagagcaagcaaaagacagatcgtcagctttcgtttcatagaggtccctcccactccttctcttttacagaatatgaggagcgggacaaggttagaccaagattctatcagtgtaagtcaagctttatccgccttttggaaatcaccaaaaagtatgcaagaccgagagaacaaatgctcagccagaatgtggcatagccgatctcttgcatataggcactaagcattgagtagcggggcatcatgccgaaaagataatcaatgacgtcattatgaagcgtccaaacagcggcaaggatgagatgccataaccggaaccgaaaatacgggctgtataaaacgccttgaacggccatggcgaaatgtgaagcaatcagcatgtacccttcccaaggcatctggcccattttgatcagcacaaagatattcattccgaccgcccacagcccgtatttcacaagggttacaagcgcaagcgcttcaaacagcggcgcgtttcttccgatgagaaatgccaaaagcacaaacaggaagaaaaacgtcgccgtcgggctgtcaggcacaaacaccagaaaacgcagcggcgtgtccgcaagctgcggcaaataccaataatagccgtataccgtaccgataaaattaactgcaagagcaagcagaagcatgccgcgccgccctaaaagataagaaatccacctcataccatcaactctcagtccttaaaagatatgtatcatacaaaaaaagctgacatctggtcagctcttttcataaaagtatatcctgctattgtctgcttcacaatacgttatttcgatgttgtttcagaaatgaacttcgccagctgatcaagctgtttgtcattccctttaaaaacaccggcaggcatctgcccttttcctttgacggcgatcttttttatttcttccgggctcagcccgttatctatcagagacggaccggcgcctccgccttgaagattatccccgtgacaggatatacagccttgttctttaaatactttataaccgtctgattctgtatcaatagcggcttcttttttaattttcccttgctcctccgccttcgcccagtcatgcgtcgcgactgactgccacgttaaaaagatcgtagcgcaaagcgccaaaagcatcatgccgaccgcaaccggacgcttccacggccttctttcagaaccccggtcgagaaacggagccaaaagcagcgacccgaaagcaagccccggtattatcatcgcgccgattacggtgtagctccctgcggcatattcatattttaaaagctggtataaaaatagaaaataccaatccggcagcggaatataccccgtatccgtcgggtccgcaacccgttccaaaggcggctcgtgcacaatcgttaaaacgagaaatccgacgaggaaaacggctccgaccatccattctttcagcaggaagttcggccaaaacgcctccgtctttcccggatactctgaatagtctttcggtatattcggttttttttcagccggtatccttgaatctcctacaaacttcattcctttcccccgatgcatgtcatcccctcccttttatatcagatctgtattaaagcggtcctgaaattccctgcttgcggatcatgacaaagtgggcgcccatgagcgcaaacaaagcggcagggagaaaaaacacgtgaatcgcaaagaatctcgtcagtgtttgggccccgacaatatcgtggtggccggcaagaagggttttcacctgcgctccgatcaatggcgtcgcttccgcaatctgaaggcctacctttgtcgcaaacagcgccttcatatcccacggaagcaggtaccctgtaaaaccgagaccgagcatcacaaagaagattagaacaccgacgatccagttcaattcccgaggctttttataggctccctgaaagaaaacccgcagtgtatgtaaaaacatcattacgataactaaacttgcgccccaatgatgcattcctcttacaatctgtccgaaagcgacttcattctgcaaataatacacagattcccacgcgtttttaatatccggcacataatacatggttaagaacatcccggacagcacttggataacggttacaaaaaacgtcaatccgccgaaacaatagacaaaagctgagaaatggtgagctggattcacatgttccggcacttcatggtcagcgatatcccgccacatcggcgtaatatcgagacgttcatccacccagtcatatattttgttcagcatgtcacccttcccccctaggctttgcttttccaagatacaaaaagccgtcctttactttatgctcataacggtcaagaggcgcgagcggcggcgtgcccggaacgttcgtgccgtctttttcatacagcccgtaatggcagggacaaaagaatttgttcggatttttaggatcattgttccagtttacggtgcagcctaaatgtttgcagataggcgaaagcgctataatttcatccccatgcttgtagacccaggctgatctggattcttccgatttgtgccaggcgtcgacttgatgaattttaaagtcaaaacgcttcggctccttcgtcagctcatccacgctgacaacctgcaccattttttgatttcccgtcggttttaataccgggtccagcgcaaaacggaccataggcataagcgcactggcggccataaatccccccacgccggtgagcgcatagtttaaaaattgccttcttgatatatcttgttttccgcccatctcttccccccctaaagattgaccaaaaattaactaaaatagaaaataattctgagatttgacaccctcataatatatgaatctttcagcaaggtcaacagaggcaaaacggctgttttgcgggatgtgcggagtttttaagaattgttccacttctgtaacaaaacgttcaaaatttctccgcacttgtcatccgctatttttctctttaaagagtctttcatatgttcaaacggaacggcaggtatgcagatgacatcagagcctatttcagagtccttccatttttcgtctgccgtcagaaacaaggcgtgccggaaattgatcatcacctcttctttgagtttttgaagcagggcgatctgtaattgatctatatcaacatatgtataagaggggaataaatatacccgtcccttcaattggcgctcaagctcttcagaaagcaattgggtgctttccccctgctcaacggcttcttttaagcctcctgaagatgatatggaaattaacggaatgatagcggtatcaatgtaatctacagattgtaaatagacctcggcatcagcggccctccatctcatgtctggttcctcctctttacgcaacaagccttgcatattctgcaaggctgtcatttatgtgagctgattcaactggcgggaaagcttttcaaatgtttctttgtcgtggcggtccagcgcctcgtcgatatctctaagcagcttttcccgctggaaagtggaaatggcgtgttctaatattttttcagccatcccctgatcctgtttattttcaaacaggtctttcggcagatgcggatttgattcaagaacagcagcatattcaggcgagctgtaagccgaacggaaattcagctggataaataaatcctgctgtttattcagccggatgtcgtgaaaagatttttccgcgtccgtggtcatgacattttctttgtaaaacctaaacggcacctcatcaacgcaatgagtagacatgatgatgcctctcgggcaaaattcggcttgttctacaaaatggactttttccattaatgtatcatgactcattaaataatttaaaatccagacgcactcccggcgtttaagctgataatgatttaaaaaccaacggataaaatcctttttttcattgacagaaacaggggtctgcatgtaattccctcctctatcgatcgtataatctgacatcacttatacattcagcaagcatggtccaaaatcctgcttatctcaaaaattcatcctctatccgtaagattgtttcttcaagctcttcgtttgttccatccattgaaagcacttgttttaaaagcggcagcgcttctttctgaaggccttcttccaataagaagtgagcgtattcatacaagaagtcccgatcctcctgataatggagatacgcagcttcgaagctttttttcgcttccgcatactgctcgagacccgtataggcacttgccaaataccaattgtatttcggatcttcctctccgtaaccgcggacttcctgaatcagatcaataatctcttcaaagctttcttctttatgatagacggctaaaagcgtatggagcgcttccacataacccggatcgagcgccagcgcttcctgaagaagctttttgccttcgtcttcgttcccgagctttaacgccattttccccgcatagagaaaaagctctttattgtattcatcgtaagtaataccttctttagcggtttttaatgcatcctcatacatgccttctgcttcgaagctttttgcaagcggcatataaagcgatgaataagaaggatcaagcccttttaaatcagacagctgcttgatggcggttttgagcattcccgcctgataggctgtgaacccgtatccgaaaatcgtattcggttctgtatgttctgcagccgctttttcataccatgaaagcgcttcttcaaattcccccgccgcgctcaatgactcagccagcctctgatgaacatttacgccgccgatttcgttccgctcttttgccgtctcttcgtaatacggaacggctttcgcgtatgctccctgtgtgaagtataattcccccagagcgaaatcaataacaggctcatcttttaacatcgctttcgcctgtaacagcttttgctcacttacttcgaataagccctgcatctgatacagatcagccattaaaagaaggctttccgcgtaagacgggtcttccggagaaatcgtctccagcacctcgagagctttttcttcttcatcaatatctattaacaattcggcgtaaaaattcgtcagctcagactcctcaggataaaggtcatgcagatcactgatcagcgttaacgctttttctgcgtttccccattcatagtagagctgggctgcaatggctttgtcttcgtcatgaagctgtgtttcagcttttgaaagcgctttgagtcccttttcggtttcacctgcttcaactaattttatggcttcttgaatcaatgtattcaaatcagaccggtcctttcttttcctatacctcatcaaccaatgaaaagggtttttattcgggttattcttatcataattcagacaggagctgcccgcaaataagatgcttcacccggcattatagtttatcaaaaaattgttaagaggaaaacgacaaaaaaggggacggcatctttatacgcaaacagcgcgattgattccggctgtttctgtaacgaaaacgcatccccccttccttttcgtttaagacaagctatgtcaaagcccaagactttatgacacatgaagaaaaacccgaagaatcatcttcaggcttttttggataattgatctaaatgctcaaaaaatgtcggatatgaaacgcggatcgcatctgtatcatggatctcaatcggctcttccgtcagacatgaagcgataccgagcatcatgccgatgcggtggtcgccgtggcttgatacacccgcgccgccagcaagcgtttttttgccgtgtattttcatgccgtcttcagtcgcttcaatgtctgcgccgattttccggagctctgatacgacggtatcgatccgattcgtttccttcactttcagctctgccgcgtctttaatgacagttgtgccttcagcctgcgtggccaaaagagcgataatcggaatctcgtcaattaaacggggaatgatttctccgccgatttctgccgctttcaaagctgaagtttcgataaccagatcaccgtaaggctccgcgctgtccgcttttgacagaatcacttcaagtgaagcccccatttgctttaagacatcaataattcccgtgcgtgtcgggttcaggccgacatttttcagcacaatccggcttccgggaacgacagcgcctgccgcaaggaaaaaggccgctgaagaaatatcgccgggcacgaaaatatcagctgcccgaagcttctgaccgcccgttacagaagcgctcgtctctgtttccgcaagctcagcgccaaaagcattcagcatccgttctgtatggtctcttgatttatggggctctgtcactgtcgtcgttccttctgcctgcaatccggcaagcagcacggcagatttgatctgcgcgcttgcgacgggggaaacgtaatcaatgccttttaattgtccgcctcttacggataatggcgtaaattctccgtccgctcttccgtcaatcacggctcccatctgttttaaaggctccgttaccctcttcatcgggcgctttgcaatactttcgtcgcccgctaccgtactgtgaaatgggcgtccggctaaaatgcctagcatcaggcggatggtcgtgccggaatttccgacatcaagaaggctgtcaggctcacaaagtgcgtcaatgccgttcccgtgtatcgttacatcacttccgttctgttcaatggagacacccatttttctgaagcaggcaatggtgctcaggcaatcggctccgggcaaaaagttttttaccgtagtggttccttctgcaagcgctccgaacataacagaacggtgggagatggatttatctcccggaatatgaatttcaccgtttaaagacgtcactttttctcttttcaatgttctccacctcagtcagcgtaaaatgtttcatatttggcgcgggattgaatgcaggtttccgcccgcttgcggtcatcatcagtctggaaactgattctcagaattccgttaatatcttctcttgtttcgataatgcggatgttggtgatactgattttttcatcagccaaaatcgccgtaatttccgaaatgacccccggatgatcgggaacatcgacataaaggtcataaaaggacgggatcgcccctttttgacggagcggcaggccgtcgcgataatccttcgcttttttaaagtaaccgaacaggttgtccgcatcttcattttctacataagattcaatcgtgtcaatctcccgtttccattctttgaagcggtcaagcagtttatctttgttatgaaggagtatgtccctccacatcgccggactgcttgaggctatccttgtgatgtcccgaaaaccgccggctgcaaaacgctgcaaaaacggataatcttcttcagattggtgagcctgatgtacgaggcttgcggcaacgatatgagggaaatggctgatgacgctcgttacgccgtcatgctcctcgggagtcatctccacaaagtgggcgtttgccgctttcagaagttccttcaaatgcgatactgactctttagaagttgattttcccggtgttaaaatgtaaaacgcgttttcgaataaaaattctttcgcggcagcagccccggatttatgagaccccgccatcggatggccgccgacaaattgatagtgagccggtagcactttgtcagcatagctgacgactttctgctttgtgctccccacatctgtaatcaagagttcatgggtaatgcccgatgcggcaagcatatcaagcattttcagcgtttgcgcgacaggcgtggcgataatgacaactgacgcctgctgcgccccttccgtaaatgagccggcccgttcgtcaataatcccgagcttcagcgcggcagtaagctgttcttccgaaatatctacaccgataatccgtttatgcggatgctcttttttaatggccaatgcaatcgacccgccgatcagcccgattcccgcaagcaatattgtgtccttcatttcactcatttcctttttcatctagtttaatagagtaaagaggtgacgcttgatcacctcttataatatttcagctaaaattgtcagaatttcctcattctgctctttcgtaccaaccgtaatcctcagtgcagcaggaaatccgagcgcctgtcctgagcggacgatataccctttttccagcagggcttggaacagttcatccgcagggcggttaaattcaatgagcacaaagtttgtttgtgaaggataacaagttaaaccatgggtttcggcaaaatcataatactgcttaagacccgctgtattttttttgacacattccttaataaacgactggtcgtcaagcgcagccagtgccgaagcctggccgattctgctcgtattgaacggctctctcgccggttcaatctggcggatcagcgcttcattcgcaataccgtaaccgacgcgaagcgcggcaagtccgtatgctttagaaaatgtgcggaggatcatgatattcggatattgctttaaaagcggaatactttcagggtaatcttccgctgtgacatactcgtagtacgcttcatcaagtacaacgagaatatgctcgggaactctgtctaaaaaggcaattaactcttgttcagaagtatacgtccccgtcggattattcggattacatacccatatgactttcgtcttgctgtcaatggcttcaagcatccggtccaaatcatgagcgccgtcactgcggagcggcacctcgcgcacttcagcgccttcaatcaccgcattgtgtctgtattgcgggaaagtcggagcagcggtaatcgtgtttgcctgatcatttaataaagaacggcagataatctgcacaagctcatcagagccgtttccgaaaatgatcgaagattcactgacctgcagatgttcactgagccgcgttctcaaagcggcactgtaaccgtcgggatacagcgcaagctgctcaatctcctgatgcagcgcatctttagcggcctgtgaacagccgaacggattttcgttagatgcgagctttactactttctcaagcccgtactccattttcacttcttctattggtttgcccggctgatacggtttcagctgccgcagctgttctttaatctgcaaatccagtcacctcattttacactgtacagttgtccgaacgtctttgcgtattcctcaaattcaagaagcgcatcggctcttgtgccggaattcacaagctttgttttaagctcttcaacctttctgacaagcgcgcttccgacaacgacaccatctgatatttcattcatctcgtcaacctgtttgcggcttgaaatgccaaaaccgaccgcaaccggaaccgagctgaattctttcactttacggatgaaagagtatacagacggatcgaattcgctgcgtacgcccgtcactcctaaagaagatacacaatacacaaagccgccggcctgttcagtaattattttcaaacggttttcacttgtcggcgcgaccagcgagatataagcgatgttctcctttttgcatgtcttttgcaaaagggcgctttcctctaacggaagatccggtacaagcagaccgtctatgtcgttttcccgcagtaaagcgaaaaagcattctttttctaattgtaacacaggattataatacgtaaagaggataattggaatatgaacgccgttttttttcattttgccgccaagttcaatggcttttacgatattcattccgttttccagagcccgttttgaagcccgctgtatgacggggccatccgcgagcggatctgtgtaggggacgccgatttcaagagctgaagcgcctgcattctgcaaagattttgccagttcaacagaaatttcaggaagcggatcgcccgccgtaataaaagggataaataatttttcagagtcatgcagattaaacatgtgtcttcaccccgttttccaaaacattcatcagcgtatgaacatctttatctcctcttcccgacagactgacgagaatgattttgtctttatccatgtctttcgccatttcaaatgcttttgccaaggcgtgtgcagattcaatagccggaagaatgccttctgtttcagaaagcagacgcaacgcggcaatcgcttcttcgtctgtcacactttcatatgttacacggccgcttttatgcagataggcatgctcaggcccgatccccgggtaatcgaggcctgctgaaatggaatacggttcgataatctgtccgtatgcatcttgtattaaataggtcattgagccgtgaatcaccccgagcgtcccttttgctatcgtcgccgcatgcagaggcgtatcaattccttttccggccgcctcgacgccgatcagctcagtatcttcgtctaaaaaggcctgaaatatgcccatcgcattgcttccgccgccgacacatgcaacaaccttgtccgggagcgtcccttcgaccctgaggagctgttctttcgcttcctcgccgatgattttctgaaactcgcgcacaatgtacggatacgggtgcggacctacgacagaaccgatcaggtaaaaatggtcttcacaatgctgaacccaatatctgatcgcttcattcgtcgcatctttcagtgtgccgttgccgctagagaccggcacgacctccgcgccgagcagtttcattcggaatacgttcagcgactggcgcgcaacgtcctcttcacccataaaaaccgtacactcaaaaccgaattttgcggcggctgtcgcggctgcaacgccgtgctgccccgcaccggtttcggcgatgattttcgttttgcccatctttttggcaagcagaatctgtcctaacgcgttgttgattttatgagaaccggtatggtttaaatcttcccttttcaaatagattttcgccccgcccaaatcatccgacaccctgtctgcaaacgtcaatgcagtcggtcttccggagtaatcaaacaatagttttttatattctgcatgaaatacgggatcattctttaattctttgaaagccgtttcgatttcttcgagaggccgcatcaatgtttcagggacaaatttgcctccgaattcgccgtatcttccgatttcatttggatatggatacataatggttcatcctttcttctaaaagccggatcagtgtttgatccttttgtccgtttttttcaatcccgctggcaagatctataccgcacgggcccgacttgagtaaatcagtaatcgtttcaggattaacgccgcccgcgataaaacagcgcttgtttgcattttgagcccgcttccggtacaaggggacacgggtccatgaaaacgcgattcccgtgccgcctctcattcctttcactgaagaatcaatgacatagccgtcgacggcgggtgcaaattgatccatctgacggagcgtcccttccccgtgacggagcgctttccatatctccgagcgcacaagcggacggagacggagggcatcctcaggcgattcatcaccgtgcagctggatgacgtcaagggacaattcagaagcgatttgcgcaatgttttctatcgtttcatttacaaatactccgacatgtttcttatctgtccggatttcctgtttccatttccgtacttcatacggcgtgaccttccgtttgcttgcggcaaaaatgaatcccaaataatccgcttctgaggctgccgcaagctcataatcacgctttgagcagatgccgcagtactttatttcaggctttttcatgccctcactccccgaacagcccgcggatcgccttttgctgcgaatcctctctcattaaagattctccgatcaatacagcccgcgccccgtgcttattgacgaatttcaggtcagccaaagaaccgatgccgctttcgctgaccagcagacagccgtccggcacaagatccgccattttttccgtttgtgaaacagaagtacggaacgtttttaaatcccggttgtttatgccgagaatttccggctgaaacacctgtaaaatccgttcaaggacggtttcatcatggacttccacgagaacgtccatatccttctcacgggcctccagataaagctcatgaagctttgagggttccaacgcttccccgatcagcaaaatcgcatcggcgccgatccggtacgattcctccacctgcagggaatcaataataaaatcctttctcagcacgggaagagaaacggtttgtttcacatctgtcaaaaattgatttcttccctgaaaaaaacgggtatccgtcagaacagagatggcatccgctttggcagcttcataatccgccgcaatcttttcgggaacaaaatgctctttaatcagtcctttagacggcgaagctttttttacttcggcaatcagtccgataaaacggttcgggttcaggatcgcttctttaaaggatctccgttcaatttgacggttttccggcagcacgatggatttgatttcttcttttttctgctgaatgatttgatcaagcatatatttcttcctctttctgtttcagacgttcgagctgctttttggcatctccgttttgaatggtttctaaagctgtttttgttccttctcccagatcttttgcaagacctgccgtataaatggccgcgcccgcatttaaagcggtaatatgcagagcggatgacggggcttcatttgcaaaaatattctgaatgaggagcgcgctttcttccgctgaactcacctgaatatccttcagtgaaccttctgcaaaaccgaattgttcgggtgacacggaatattccagacgttccccgtttttcagctcaatgacatcggtcggtgctgtgatggacagttcatctaatccgtcacgcgccgatacaagcatgacgtgcctgacatcaaattgttccagtgcgcttgccatcaggcgcgctttttcagatgaatagacgccgatcacctgccgcttcgcctgcagcgggttgctgagcgggccgagcaggttaaatacggttcggaagccaagctcttttctcgcggcagcgacatgcttcattgacgaatgaaacagcggcgcaaacaaaaaccccatttgcttcgtttcaatgctgcgtttgacgctgtccggagtggcttgaatggaaacccccagtttctccagcacatccgcgctgccgcttttagacgaaacggaacgatttccgtgcttggcaactttagctccggcggcagaggctgtaattgccgctgccgttgatatgttaaacgtagaaatcccgtctccgcctgtcccgcacgtatcaacgacatcctcgaggccatctgcagcttgtgcacgcgcccgcatcactttcacaaatccggcaagctcctccgccgtttcaccccgatgggctaatattgataaaataccgccgatttcacactgcgacatatctccgttcatcatcatctccatcagcttttcggcttctccggttttcagcgtgcggccattaacgcacaattgcagaaatttgttcatcagtcttctcctccccgtcagaaaagatgtcttctgcaatttgaatcgtttttaaaagcgcccccgctttgctgcagctctcttcatattcagcttccgggacggaatcagcgactattcccgcccccgcctgaaccgacgccgtaccgtttttgacactcatggtccggatggtaatacacgaatcaatcgaaccgtcaaatccgatataagcgatacatccgccgtaggtctctcttgaagtcggttctaattcatttaaaagctgcatcgcgcggattttcggagcgcccgtgagtgttcctgccgggaatgccgacatcagcgcgtcaacgggatggacgccctgttttaaacggccggttacaacggagatgatgtgcatcacatgtgaaaaagaaacgacctttgtgaattcaggaacggttacggaaccatactccgcgactctgccgatgtcattgcgcgccagatcgacgagcatgtaatgttcagctttttctttttcgtcattcatcagctcttttttcaggcgttcgtcttctttttttccggcgccccttcttctcgttccggcaatcggatgaatttccagatgcctgtcatgcacacggatcagccgctctggcgaactgccgacaatgtctctgtccggcagtttgatatagtacatataaggtgaagggttgacgatgcgaagcaccctgtacagctcaaatgaatttctggataccggaatatcaaacttttgcgacagcaccccttgaaaaatgtctcccgcttttataaattctttcagtttattgacgccggccataaacccttctttcgtataattagatgtcacattggcaaagctcggcgtgtcaaacgttgcctttgaaaaaaacggctcttttatatccttcggttctgttaaaataccgataagctcccgaagttccgcacaattttctttaaaaacggcccgtttttcttcttccgtctcccggccgttaagcgttgcatattgaataaaatgcacttgtttcgtttcatggtcgtacgcaatgattttccggcagacaaacagcatgcatttttctagatctgtttctttcgcatgccttcgcacagaaggctcgatcagaggaatcatatcatagctcaggtagccgactgcccctcccgaaaatggaatatcaagctcgggcgttttaatgcggaagctttcattcatccagtcaagcaccgctcttaattctccggcttcaaacagcgtatgccctttcggatcagcagcagcgaatgtgttatgactctctttaatcgtgataaaaggatcgaggccgataaaagaatatcttgaccagcttgacgactcatccttgctttccagcagatacgtaatgtttctgtccagtttttcaaccatctgaatgggtgtgatcgtgtcgactgtaaaagtctctgcgattggaatggtgcggtgtgtcagactgtcctttaaaaataaagaaacatccgattgtaaattcatgattctcctccttgcggtaaggagaatgagatgaagagtgagaggagtgttgcgtataagaaataaacccaaaagaaaggcttcttttgggcagaataaaaacgtgtttatctcagctcagctaaactcattctctgctaccctattctaaactcaactgttcaatatcttgcttatcagctttatacacactcttgtgtatttctaagctttgtttatcgtattacatgtcagtattttttgtcaatgataaatccggtcttaacacaacggctttttctagataaacatgtttgatttcatcctgaggcgtatccgtctgaaccgtcatcaggacgcggacacactttttcagagcgccggcgacatccatttcctgcatgcacgtcaccgggacgtactgccatccggaaaggctgcggaccgcttttgccggaaatacggaatggatatcaggcgtggcggataacaggatctgcacaacgtcttccggtttgcatccattttgttcaatgattttttcaagcagctgctgtgttttttctaaaatttcttgttcggtgtcttgctccaccgttgttgctccgcgaatgccgcgtatcatcatgctgtttcctccattcgccatttgttcagcaagttttcaagctcatcttttgaaagcatacagtcctgtgcttcgcctaattccttcaatacgatgaactgagtcatgcctccgcgcgtttttttatcattcatcattctggcggagagaaccggcgtttcaatatcctgtctgatgcttcccgggtagccgagtcctctcagccattgcgtgagttcttttctgttcatcttgcatcccgcaacctgttcacttacgtaaagagcaaactgcatgccgagggcgactgcatctccatgtgtaatccggccgtagccgtattccgcctcaacggcgtggccgagcgtatggccgaaattcaggaaagctcttatcccctcttccttttcgtcctcacgcacgacggccgattttattgaaattcctttataaatcatttcattcagctcagcgcttgtcagtccgtgtaacgtatcaaacgtgagcagcttttctaaaaaagcgtgatctgcaataaacgcatgtttgatcacttcagccatgcccgatctcagctcttgttccggcagggttttcagaagctctgtatcataaatcaccgcttttggctgataaaacgcgccgattaagttctttccgagtttgtgattgacagccaccttgccgccgaccgcgctgtcatgggccagcagcgtcgtcggcatttggatgaaatcaattccgcgcataaaagtcgctgcgcaaaagccggccaaatcacccgtcacgccgcctccgaacgcgatcatacatgaggaacggtccatatggaaagcgatcgcttccgtttgaatccgttcatactcttccaatgacttcgcttcttctccgcttggaacgatcacttttttcacgtcccatgtttcgtttaaaagcgtgaacatttcatcaccgtaaagccggtcgacttcagcgtcgataacgagcagaatttttgtcagcggcctgttcagcgaagccaaaagtgcagcggcctgtttcctaatgccttcaccgatatacacgggatatgcggaggaagctgtccgaacctcaagctccttcatcagaattccctcgataattttctcatattttctacattttctttaatgcggtcgatctggtcgaggccgaattgttctacgacggcatttgcgatttcccaggccactgctgcttctgccactacgcttgctgcaggaacggcgcagctgtctgaacgttcaatactcgctgaaaacggttctttcgtttcaatgtcgacgcttttaagcggcttgtataaagtcgggatcggcttcataacaccgcgtacgacgatcggcattcctgtcgtcataccgccttctaatcctccgagcctgtttgtcgcgcgtgtatagcctttctcttcatcccacacgatttcatcatggacatcactgccgtttttgccggccgcttcaaaaccgatgccaaactctacgcctttaaacgcgttaatcgacagaacggcagcggcgagcttgctgtcaagtttacggtcataatggacatagcttccgacaccgacgggcatgccttcgacaatcacttcaacgattccgccgattgagtcgccgtttgccttcgcttcatcaatggctgccatcatttgacggcctgcttcttcgtcgtagcatctgaccggtgattcctcagttacccgcttgagatcttcaatagatgtgtaatcggttttctcggcttttaccccgccgatttgcagaacatgtccggcgactttaatgccgagctccgctaaaatctttttagcgacggctccggcagccacgcgaaccgttgtctcacgcgcggaagatcgttctaacacatttctcatatcgcggtgattatacttaatggccccgtttaaatctgcgtgcccaggtctcggtcttgaaatctggcgtttcatttcactttcttcttcttctgtaatcggtgctgcgcccatgatttttgtccagtgggtccagtctttattttccacaacgagcgcgatgggtgaaccgagtgtccgtgcatgccgcacgccgctcgtgatctttgccctgtccgtttcaatctgcatgcggcgtccgcggccgtgccctttttgacgtctggcaagctcaaaattaatgtcttcctcagttatataaagccccgctggcacaccttctataatcgtcgtcagctgcggaccgtgtgattctccggctgttaagtatctcatttctttcttctcccttcatcgcattaacgcttttaagtaaaactataacacaagttttcataaaatgtcttctatcttttttgataaaaaaatgtatcggtgctttcaaggccgaatttttccgggctgaaaatctgttctgtgcttccgacaaacagaattccgttctttttcaggctgcccgccattttcacatacagctcttctttcgctttttcagtaaaataaataaaaacgttgcggcagacgatcaggtcaaaatcctgttcatagctgtcagcaagcaggttgtgccgcttaaagcggatgtttttctgtatctcttgctttacttgatagctgttgtcgtcctgcttggtgaaaaagcggctttttacggaagccggcacctcttgcagcgagcgctcctgatagatgccccgcttggctttgctgagcgccttttcatcaatatctgtcgccaatatatcaaatccggccagtcccgcctgctggttgagaatcatcgccaaggtatagggttcttcccccgttgaacaggccgcgctccatatttttaacggtttgttatggtttaataacggaagaatggaagtttcaagaacttcccaccgtttataatttcggtaaaattcagaaacattgatcgtcattctgtccaatgtttcatttaataatagcttgtctttttccaaagcggccgcaaattcctgaaaatccctgaatccctttttttcataaagggacgtcagccgccttttcatctgtgcttctttgtataaagataaatcaacgccggttatttttttccacttcgtgataaaaatttcgtaaggctccattgcttctctcccaatctcgctgtcttttgtcctagtatagcctgttttctttctaaattgtacgatttcaataaaaaaatcagcccgcaggctgatttgtgagaaatgaaaagacaggacagcaaggcctctgtctttcttaaacgatgtaaaccctttcataatacgagaaaaagaaaggctgacggcttagtacacccagtcggccattaatttttgatacggtacaagctcttcctgtttaaagaaaatctgaatttcccgctcagcgctttctaaggagtctgaaccgtgaatgatatttttgccgacaaacatgccgtaatcaccgcgaatcgtgcccggcagtgcgtctttcgggtttgtttttccgatcagctgtcttgtgatctctactacattttccccttcccataccattgcaaatacgggtcctgatgtaatgaattccacaagctcgccgaaaaacggtttccctttatgttcagcataatggttttcagccatctgttctgaaacttgcattagcttggctcctgccaattgtaagcccttacgttcaaatcttgataaaatctctccgatcagctggcgctgtacgccgtccggttttaccatgataaaagttttttccataagattctccaccccatcattatgtataggctttcaagttgcacaccgaaatcgtaacatctttctgacaattaatcaatccagggcggagaatgttcacatcttgttcgtaaaagggggttaaaatttccgtttgccgatatatttggcgattgcggccaatgatgagcgcgcccggcctctcggcagtgtattcagcttttcaaacgctttttttaagtacctgtcactgactgccattgatttttcaatcgcgtctgtgcgttttatattttcaataatgggggcaagctgctcctgtgttgtttcactgttaattaatttcagctgatttctcaattcaggctgatgcagcgcgtacaaaacgggcagagtgacatttccttgcagcagatctcctccgaccggttttcccagttcctcttcggtggaagtgaaatcaagaatgtcatcaataatttgataggacatgcctacataatagccgaaccaatataatgctttatgaatcttctcatcagctcccgaagcgatggcgccgagctggcagctgacggcgatgagaagagccgttttccgtttgatgcggcgcaaataggttctgaggttctgttccatattgtatttatctctgatctgttcaatttctccgaggcaaacttctacgatggttttggacaggatccggtgggctttcggctcatcgagtctcgtcatcatctcaagcgagcccgcaagcatataatcaccggtatacatggcaatgcggttgtcccatttggctttaatggtcggctttcctctccgcagctcggcgtcatcgatgacgtcgtcatgcacgagggacgccatatgaatcatttccagcgtcaccgctacatattttattttattaatgtcatagtcaccgaacatgccggaaagcaatacgaaaacaggacggatgcgcttgcctcccgcctgaagcagatggagccccgcttcgctcagcaagggatagtcagaccgcaccgtctgctcaagctccctttcgatcacatcaatatcgtcatttaaaaaagaataggccattttaaatttcatatcattcacccaaacatctgtatattcatcatttccaaccgatatgcgtagcggccactccgccggtaaacgaatggtatttgacattcgtcaggcccgcttcttcaaacagacgcgcaagctctttcataccgggaaattctcttgctgattcttgcagccaggaatattctttatagctttttgcaaacatttttccgaagaaaggcatgatgtatttaaaatagaggaaatatgcctgtctgaaaccgaacatttccggctgggatgtttctaggcatacgacctgcccgcccggtttgacgacccgccgcatttctttcagcacggtcaggtagtcgggaacgttccgcagtccgaagccgatggtgacaaaatcaaaagaattatcatcgaaaggaagttccatcgcattcccgtgcaaaagctcaatttggctgtaaccgccctcttttacttttttctcgccgatgctcagcatatttttgctgaaatccagtcctttgatttcgccgcttttacctgccgcttctgcgagggcaatcgtccagtcagccgttccgcagcagacatcaagcgcttttgcgccttctttcacattcatgatctgcatcgttttgtcgcgccattttttatgttgctgaaaactgataacagagttcatttggtcataatttttgtagattttttcaaacacgccgtgtacgcgctgttcttttgactcctgcatgttgattacccttcttccactttctgatgatatgttttgtcttggctgatcgcttgaagccggttcagcattagattttggattggtgaattgagcggcagcagcgtttcaatgctttgcttcgccttccggaagctttcttccagaatgtcagcctttgattttcctgactttacaatattgccgatgacatcgagaaatatagcattgccgttcatcagccgcttatatacaaaaaaatcactcgccagctctttccagcgcggaagattgaagtggtctgacactctgtgaaacagggccgcttccacaatcgccatgctttcaatcaattgattcaagtcattgacagaccgatcgtacagacggattttatgttcattgatttctttaattgccgtagcgagcgtccgaatcatatagatatccttcatttcagataaaagcgaatagtacagtccgctgaaatagtcgccggcaagcacggtgagctgccggtttttattttcgtctcgctttaacgctctggctgttgtcacttcatcgtgggtatcaagggcgctttggacaagcatcgcagttactatgtaattttctctgtcgttgttcttaatgtcagcctcttcaaacaaagcgtgaaaaagaagcagcttatcctcatcgattttcggcgcagaaatatgtttcgctaaataaggatgagacagcttttgttttaatttcgtatttaaattcgctaaagttccgtagatgtcttgcaaaaatatcacccttgtccccaaattcacatttattctaatatgtatgagatttattcgtcattattatacgcaggtatcattatagcataaaaaaaagaaattggctgtattctcccgccgtttgcgggcaatcagcaaaagcgggaaacagccggcttattttttttcgctgttcatttctccgtaagcggtctggatgagggcgttgcctctcactttgatggcggatgtatgctctgtaaactgagcgataatcacttcacccttgtccagtttttcggaatggtggaatttcgtatccgttcctctcgttaaaccgatgacgttcacaccgtcctcgaccgctttaatgacgacaaaatcacttgaatgctttgaattcatatctgcaccctctatcattattaatccgcacgtttaatatgttctaacacttcagaacgcgccgctgcgtcatctttaaaaatacctcttacagcggaagttactgtttttgcccccggctttctaacgcctctcatcgtcatgcacatatgctcagcttcgacgacaaccatgacgccgtggggatctaaggtttctacgatgctttctgcaatcgttgacgtaatgcgctcctgcagctgcgggcgttttgagacggcttctaccgcacgcgccagtttactcaggcccgtcactttaccgccgcgcggaatgtaggcaatatgcgcttttccgtaaaaaggaacaagatgatgttcacacatagaatgaaacgcgatatcttttacaagaacaagctcctcatgatcctcgccgaaaacggttttaaaatgctctttcgggtcttcgtttaatcccgagaatacttcagcgtacatttttgctacgcgtttcggcgtatctaaaagcccttcccggtccgggtcttctccaatcgcctctaaaatctggcgaactgcctgttcaatctgttctttattaacttctttcattgtctgtgtcctccaccattgaatacatttaatttcgattctagcacatttgccgcgccaaaagcaaaacgaaagtcctgcccggagaccgaggctgcttaaatatgaaaagcccctttatcaaggggcttttctgtgaagaaacaaagtgtatgtatcagatgcatacacgatctatattcacaattattttcctgcaacagcgtctttaagagctttacctggtttgaaagcaggtactttgcttgcagggatttcgatttcttcacctgtttgcgggttacgtcctttacgtgcagaacgctcgcgcacctcaaagttaccgaaaccgatcagttggattttatcaccatttttaagtgcatctaaaatcgtatcaaaaacagaatcaactgcttttgtagcgtcttttttagacaattcgcttgcttctgcaaccgcattgattagttctgtcttgttcatgcctttcacctcctcccaaaagggtatcaattcagcagtttattatcatttcttcacagttcagtctgattctaaacctgtctgataaaaaatcaatccagggaagaacagacaagtaaacggcttttcataagaaaacagacacttcgaggaatgtttgtccaacaaagtgaagattttctgtaagtagagtaacacatataaaaagccatatcaagcattttaaagccccaatcccttgctcgtcaaggttttcacgtgttttcccgaacaaatattcctttttttgcttttttcctcctaatccttgattgatttccagtatctaaatagacataaaaaaagaccccccgtatcaggaagaggtccttcagcttacaaaataattgcgatcaggccgcctgagccttcgtttataattctctccagcgtttctttcagtttatatctcgcattttcaggcatgagcgacagttttgccgagattccttctctcacaatcgagctcaatgatcttccgaaaatatcagagttccagatagaaagcggatcatcctcaaagtcctgcattaagtagcggacaagctcttcactttgtttttccgtcccgatgatcggagcgaattcactttccacatccactttgatcatgtgaatggacggggcgaccgctttcagccttaccccgaaccttgatccctgtctgatgatttccggttcatcaaggctcatatccgttaaggccggagcggcgatgccatagccggtctgtttcaccattttcagcgcgtctgatacctgatcatattcctttttcgcgtgggcgaagtcctgcattaattcaagcagatggtcttttccgcggatctcgacgccgaccacttcttttaaaatctggtcatataaatgatccggcgcgtataaatcaatttccgcgacaccctggccaagttcaattccggccaagcctgcgctttcaataaactcaaattcactgaagtggccgacaacccggtcgacgtcacgcaggcgtttgatatcttttacggtttctttcactgattcctggtaactctctctgagccagtgattttctttcagcaccatgacccagctcggaaggttgacattcacttccagcacagggaactcgtaaagcgcttctctgaggacgcttaacacatctgtttcccgcatgctttcaacactcatggcgaggacaggaatatcatatttcgcgcttaattcagccctgagcgcttctgtttccgggtgatacggcttcaccgagttgatgaccataataaacggtttgccgacttccttcagctcgtcaatgactctttcttccgcttctacgtaatcgccccgcgcaatatcgccgattgaaccgtctgtcgtaatgacgaccccgattgtggaatgttcctggatgacttttctcgtaccgatttccgctgcttcatgaaagggaatcggttcttcgtaccatggtgtattgatcattctcggaccgttttcatcttcatatcccttcgccccgggaacagtgtatcccacacaatccacaaggcggatattgacatcaagtccttccgccacatgtacggacatggcttgattcggcacaaattttggttctgtggtcataatcgtttttcctgctgcgctttgcggaagctcatcctgcgcccgcgctcggtcggcttcattgctgatattcgggagcaccacgagctccataaattttttaatgaatgtagatttccctgtacggacagcgccgacgactcctaagtatatatcgcctcctgttcgttcagcgatatccttgaaaatatcgaccttttccaagtgatcccctcccggacttcctatccttatcatttttcattcaccattcttcaatcaaatacaggacactatatgtgtatgacgttgtcccatttcaatatgacatctttagaaaattttcaggcaatcttttctatcggaatcaaaaaaacctttctccctatttgtatgcgcgggagaaaggttcattcctgtttcgttttactttctaaaaaaacgggttcctgtttttcatttacggtgtatttgactgaaaaggccgggacgaaaggagtctcttcccataaaatatcctgaatttccgcgcccggtttgattttctttttgttttctttcagacagcgggcgagatcgacgcgatagtcggcatagatttctccatcagctccgattaaaagcggcagagacgcgcctgaaaccggactttcgacagaaggagagtctttcatgccgagcttttttttatttaaagtgaacagcccttttgaaacggcgtcctcatagggtggatatgtatgcttttcctgatacattttgacacgcagctttatgtcgcggattgcctccgccatttggagatcgatcagcttcacagtcggcttattttccacatcgacaagcacgtattggtacattcctccgctttcaaaagcagaggacggcggctcctctatatatctgggcgcgagccgcttaaaatctatcggatatttttgatagatcggtgttttcatatcttttgtctgaatcggcagaagtccgccgttcgcctttttaaattcatccaccgccgcttgaacctgctgaagctgatgcttgtaagatactttattttcagttttttccgcttcaggatacagacagccggacagcagaagcaccgcaattgccgttatgacggccatttttaacttatgcattccgcgccccctttttttgctttattcattgacaggtccgctgaaaacgaccattaacacgatcaatcccgagatgaccatacaggcataagcgagtgaagaaactgctgcttttatcagcctgtttttaactttgtacctgctgacataaatagaggccaccgccacaaacattaatcccatagcaccaagcgcaaaccacattttcatcaatgccacactcacgtccgtgccccccgtccaatcattgtaagcgttatatttcattttaatatacaaatgttgaaaagatcaacaggttttccatctattgaaaaaaacaaaaaaactgaagcaaagagggggactttgcttcagtcaagttgactatattcacctatacgcctgagatacactctcttggacttcgatgctatagtatgcgtagatgcgtacgtctgcatcctcttctgcctaaatcagcaaatgttttgagcgatttcagccggagagttccgcgttttggactttcgtcacttcagaatatgctgacggcatgttattgtcactttacccggttttcgaatgtgttgaccaagtcttccatctcatgggttttcactctggccattaaggattctacggccgtttctaccttctgcccgttaaataacacttggtgaagcgcctctgtaatcggcattttcacttgatatttttgagacagctgatatgccgctttcgtcgtccgcacaccttcaacaaccattcccatctggtcaaggacttcttcaagcttatacccttttccaagcaggttgccggcgcgccagttccgtgaatgaacgcttgtacacgtcacaattaaatcgcctacgcctgtcaggccggaaaaagtaagaggatttccgcccatctttgttccgagtctggcgatttcagcaagaccgcgggtgattaaggccgcttttgcattatctccgtatcccaatccgtctgtaattcccgctgccagagcgatgatgttctttagcgctccccctatctcaacaccgatcatatccggattggtatacacgcggaaatgctggttcataaataaatcctgaaccgcttctgcagcctcgatattttttgaagatgatgtaacggtcgtcgggtgtcttaatccgacttcctcagcgtggctcggtcctgaaagcacgacgatgtcttttctgtactcctcaggcagctcctcctccattaattctgaaatgcggagaagcgaatccggctcaatccctttgctgacatgaacaaaaattgatttcttcgggatgtaaggcagagcctttttcagcacttcccgaatggcttttgtcggaaccgccacaatgatgaagtcagctccatttaaagcctcgcttacatcagctgttccgatgatagaacttgatagctccaccccgggcagataatctttgttttcatgcagttcgttgatttgatcgatcaattcggcacgatgtccccacatcatgacttgatgtccgttatcagccagcactaaagaaagtgcagtgccccagcttcccgctccaagcattgccacttttttcatctctgtatcacacctttttattttcttgctcttgcaaatattttaattggcgtaccttcaaatccgaaagcatcccggattcggttttctaaaaagcgttcataagaaaaatgcatcagttccggatcattgacaaaaacaacgaagctcggtggcttaacagcgacttgagtcgcataataaatcttcaggcgtgagccgttgtgcgtcggagtcggattcatggcgaccgcatccatgatgacgtcatttaagacatttgtctgtacgcggagagagtggttttcactcgctttaataatcgcaggcatgagtgtatgaatccgctttgtcgtcagtgccgacataaacagcaccggcgcataatcgagaaattggaaatgctcgcgtatattctgttcaaattctttcatcgtgctttcgtctttatcaacggcatcccatttgtttacgataatgacgacggcttttccggcttcatgggcgtatccggcgatccgcttgtcctgttcgaggatgccttcttctgcattcagcacaacgccgacgacgtctgagcggtcaatggcttttaacgcccgaagcacgctgtatttttctgttgtttcatatacttttcccttttttctcattcccgccgtgtcgacgatcacgaattcctgctggttataggtgaatgccgtatccacagcgtctcttgtcgtacccgccacgttgctcacgataacccgctcttctccgagcatcgcattgacaagggaggatttcccgacattcgggcggccgatcagacagaattgaacgacatcatcattatactttgtttccggaatgtttttaaaatgctcggcacatgcatcgagcaaatctcctaatcccaaaccgtgagtacccgaaatagggtacggctctccaaagccgagcgcataaaaatcatagatgttcgctctcatttcggtattatctaatttattaacggctaatacgaccggttttttcgtccggtacagtatttttgccacttcttcatccgcagacgtcacaccttcacggccgttcaccataaagatgatcacatcagcctcgtccatggcaatttcagcctgctggcggatctgtgtcagaaacggttcgtctccgatatcaattccgcccgtgtcaatcaggttaaaatcataattcagccattccgccgaactgtatatccggtcccgcgtcactccgggggtatcttctactattgaaattctttcacccgcaatccggttaaagattgtggattttcccacattcggtcttccgacaatggctacgacaggtttacccatagtacccttcctttcaatccagccgcttacattttcacaaaaattgttcaaccggttattaaaaatcatcttcgctatgaaaagaacccttcaaacagaagggcttaactcatttattatatcagttttcactgagatcacaatgtattcttcaaaatgtttcgcattcatgtaacagtctccgtccgttttcaagacatttttgtcgcccctttgccctgctttttgcttttttggctgatgcgtgcggcgagctgttcatatgtagtcagcccgacaagcaggatcactcccgccgagcagcctgaaagccattgatagccgccgacggctgccgcacccgcaattttgtgaatgaccgccgaatacaatagctctccttggcacatgccgagaacaaaaagacaaagcctttcaggaaatcgcccctcaacagagaccgtaatcacggtaagcagtatgaccgccgcccactcaggttttatgataaaccaaacagggtcatataatgcaaaaagaaaaataaagccgtacgctgccgaagccgtcagatgaatcacaatataacgaagccgtttatgcatgccgagactccccgcgtaaacaaatgccgcagcaaaaaacatgacatatgccgcgttcagcgtaaaataagccgtcatctgatgtatgcttgccatcatattagtcaaaataaagactgatacgtaaaaacggcttttcgttttggcaaaaataaaagtcgcaagtatccataaaaaccacatcgaccagtaataataaaacggttccataatcgctcctcctctgaccagtatggagcggtaacgtactttttaaaccaataaagctgaaaggagcagatgaagatgggtaaagacagacaggagaaaaaactgaaagcctcccgccgggtggaatcggatcgcgatgaatcgattcaccataaaggtgcgacaagcctcgagcaaaacggggaattccgaaaaagaaaatcgtaaacagaaaaaaaggcatgcgggtacgcatgccttttaacgtctgctgaaacgggatgtgtcaattccccgttcagaaagccagtgatgtgtgtcaccttttatgaccaaaggcgccttttgcaattgggcaaccgattgacagccgagaacggtcataatcattttcagctcttccaacagcgccgtcatctcgtcaaacagaccctcttctccttttgaggtgagagctttcaggaaaatgcccgccattcccgcagaagaagcgccgagggcaatcgttttagcgacatcaagcgcactttgcagccctccggatgcgataattgattgatcaacagaaagcgaatggatttccgctaagctggctgcagtggaaattccccacgtattaaaaaattgaagcgccttctctctgcgcatattttcaattttagaaaaatttgtcccgccgtacccgccggcatcaacagccgccgccccagcatcaaataactgccgtgccgattccctgctcatgccgaagccgacttctttaacgaaaacgggcactcccgcttcatctacaatctgctcaatacggcggagagcgcccgtaaaacttctgtcgccttcaggcatgacgatctcctgaatcacatttaaatgaatctgcagggcgtccgcctcaatcatatcaaccgcccttttcgcctgctcggcgtccgcctcgctccctaaattcgcaaatattaacccgttcggattctcttttctgacgatctcgtaagaataccgttcagagggatcttttaaggctgacatttgcgaaccgacagcaagcggcatgccggctttgcgcgcggctcttgccagtgacctgttaatttcgtatgtaagctgtccgccgccgcctgtcatcgcattgataaaaatcggcgaactgcttgtgagtccgccgatttccgttgagatatccactttttccaatgcaaggtctggcaggctgacatgaacaaacgtaatatcatcaagccccgtttcccggttttggccggtagacagcgcatgatttatatgttctctttttcgttctgctcgtgtcacgttttatcaccaatttattttaatttattgagcttgtccccgattaaatcgccaagctggaagccggtgctcggctcttctttcgcctggtattgacggaagtcctcctgatcggctttcggcgcttcctcaagctcacgcatgcttaaggagatgcgttcttcgctttcgttcacgtcaaggactttcactttaacagtctgtccttcttccagcacttcatgcggcgttccgatatgtttattggagatttgtgaaatgtgcacaagaccttccacgcccggaagaatttcaacgaaggcgccgaagcttacaaggcgctgcacttttccttcaagcacatctccctgctttaccttttcgccgatctggctccaaggtcccggcagcgtttctttaatagataaagaaatacgctcgttatcacggtctacggacaatactttcacttttacgtcctgaccttcttccaccacgtctgacggtttttcgacgtgtgaatgagacagctgcgaaatatgaacgagtccgtcaattccgccgatgtcgacaaatgcgccgaaatcagtcaggcgctgtacttttccttcaagaacgcttccaacctcaagcgtttggagaaaatcatgttttttggcagtctgttctttttccactacagcacggtgtgacagaatcacccggtttttatcacggtcaagttcaacgacgataagagagagggttttccctttatagtcagtgaaatcctcgacgaaatgagcttcgacaagtgatgcgggaatgaagccgcgaacgccgatatcaacgacgagaccgcctttcaccacatctttcacttcagcttcaaacacttcttttgtttcgaattttttttcaaggtcttcccaagcgcggtcagcatcaacggcacgtttagataaaatcaaagcatcgtcttccacttttgttactttcaggtcaagctcgtcgtcaacatttacgacatccgatgctttctctacatgaagacttgataattcactgattggaatgattccggactgtttgacattgataatttcgacatctacatgcttgtcctctacctttgtcacaatcccttttactacatctccaacctctggcacttgaacatcaatttgattcatttcctctgtcatttgaataacctccttggtccaaacctacacagcttaattaaaacggtttgaaagctgaacatgtgaatgtccgcttttcagccgaatatgtattaaagaatcatccaaaaatattttgaatgatcaataaaaagttttattagtattaacttctaataaaaggactggtttgtcaagcaataacatcttgttcttatgaaaaaaatttaaaatgcgctccggccaagttaacgtgatttctgttcaacgatctccagaatttttcctgcgacttcggcaatgctgagtgacgtcgtatcgatttcaatcgcgtcctccgctttgcgcagcggggaaaattccctttctgaatcgagtttgtcgcgtcttgcaatttcttcaatgagcgtttcgtaattcacgtcatagccttttttcttattctcctcaaaccggcgcttcgctctttcctctacggacgccagcaggaaaattttcacttccgcatcaggcagcacgtgagtaccaatatcacggccgtccatgacgacgccgcctttttctccgagctgctgctgtcttttcaccatttcttctctgacgcctttatgcttggcggcgatggatacttggttgctgacttcgtcttttctgatttcttctgtcacatcttctccgtttaccagaacgatttgtccttccggagcggatacaagctcaatcttcgtatgctttaacagctctgtgagcgcggcttcatccgttaattcggcattttgcctgagcgccgtatatgtaatggcacgatacatcgctcctgtatcaatgtacacatatgatttcttctcagctactattttagcaacggtgctttttccggcagccgccggaccgtcgatcgcaattgataatttcttgtccataatctctctccttgctctttactcctctatggattgtatcatgaactgcccgaaaaagggcgaaaaaaattgagctgacttaccgctttaccgtttcaatccattcttttttatccattttatcaactccctcatatttcacggctttcgaaatataaggttcaataggctgataatgaagcaaaaattgtaccgcgcccaaaatcacgagctgaatgcagaccaatttgaccagcagacgttcaaacgttttcatacacgcgcacctccattaggattagtatggaaaagtacgctgctgtttattccggctgactgtttcttctctgctgcagctgcgcgcgcatacagtattggagtaattgctgctgcgatccggcatcgatttctgtaaattcaagcgtcattttttgtttatccgccttttcatcataaaaaaaccgctgggtaaccgcttcagctgatatatcgtctgtattttccttacccggaagagagaatgagacatacagcttttcacccggttccacggaaatatgctcaggcatcacaactgcgattccgccggcgctgatattagaggaaaccgtttgaaaggcggtttttttcgcttttattttgacggatacattcaatacagcgtctgcacggacgtaccggcgtctttgaatccgcttcatttcctttttaggggggatatccaatccgatcatcgggataggatcttttttctttcctttgattatgcttttaaaatgatacggcacttggccattccccataaattccgctgttatttccagccctttgtgcaaaaagaccgtccgtcccgaatccagatcgacgggatatgagatatgcagttcgccgttttcaacgctgacagccttgctcctcgctttttttggctcattgttctctatgtattcaatccaaatataatctccgacagctatcatgggccttcactctttcattctttatgcttttattaaagcatgtaatgaaaaaaaggaaaagacttttagtcctttcctcctttatttttataggtctttatatataggttctgcactttttaatttttctattttttcctcttttccatcgtctgcatttatgaacatttgatacgtgtctttcccgatcgtcccgagtatttcgtagcaaagcacttcctgaccgagttcattcgtgatcagtgcctgccgcgtctcccgcacttcaacatttttattcagcttcgctttcgcttcatcagccgataaagccggagtcggaatcgttctcgtgtgatgcgcggccaggtaatcacgcgcggaaaaaccgacgacttcaccgtcatccagcgccactttcattcggatggcttccggatatatgcggacgtttttctcaacgggaataaaagagaagacgccgatgttattgtattgcgcgctttcatcaatttcgaggccttttgtttcataaccgtttttctttaaaaacgcgacggcccggttagatgcttcattaaggctgatcttttgtttcttcacggcccgcttttgaattaaatataccggatgtccgcctttttgggtaatatccatatagatcaacgatttgtgatcggcatcattcatgcggatgctgtatacgtcccgattcgtcttccggccgctcttgaccactttaatggaataattatgatcaggcgcaaaccgttccgcgatttttaccgcttctttttctgtaatttgtttgcctttcaaatgcgtaaaaccttttcgttctgtatttgttgccgtaaacgtggggctggtgttgtcttcagaaaaagcgcctacgtttttttcgactgttttaaagctgttgacgatcgtgttatcgctttgttttttgtcagaagcgagcgccatttcaacatccatccaccgtaaatttttgctcatgacgagatgctgaacgctgcggagctggttttgaatgttctccgcctgtttatacaggctgttcaatgtcgtatattcttttttatcaagcggtttttgatctaaatcccggacggatgttttatagctgaaatctcctatattggataaaaactcctccgtcttattaaaaggcataagtgtcagcggcagctggctcacattgttatgagcttcagatgttattctccatacatcaatgagcgccggtgacagagattttttactgttcatggcaagcgtcgtcccgattttgtcgtgaagctgatcaacatggtaagtcagttcatgaaaagccctctgataattattttccgcgtgcagaaggaccgcatccttttcctgatgctctttataaccccagtatccggttgcgacgatcacgacaccgagaacagcgataataattcctctaatcatgttaacacctcatttttcgtacttttactcacagaaaatgtgttttccgattcttttaatctgcggccgtccccaaatccatttgcttgtcgccgtatcagggttaaaataataaagcgcgttttcagaagggtcccagccgttaatcgcatcaagaaccgcttcttttgctctttcattcggctgcatatatatttgcccgtcggcaacggcggtaaaagcgagcggttcgaaaatgacgccggccaccgtattcggaaataacgggcttttaatacggtttaaaataaccgcggcgatggcaacctgtccttcaaacggctcaccgcgggcttccccgtacacagcctgcgccagaagattgatatcgttgtttgagaaaccgcccggcatattggccgctgtcgtgttttgcttttgttctgactgaccgcctgtattgttttgcggtttttgagcaggcttattcgttcccgccgccggcttctgtgcgcctgctgacggtttcgtttgattttttaaagggacgttgccgtaatgggtgaacgtattccctttttgaatctgctccattacatattcgcggtaatattttgattttgaaatcagcacctgtttggttttcgcaccgacgagaccgtcaaccgccttcatgccgaatttctcctgaaaatttcgtacggcccagtatgtggtccacccgtaaacaccgtcgattttcccgttataaaatccgttatattgaagacgtgcctgcaattctataacatcatcaccagtcgcgcctctttgaatcacttgatttgaaaacgcatgggccgtttcatgttcgaaaaaagcggcagcgaaagaaaatagaatgagacatgccataaacgctcctttgcacttcatcttttcaagcctcctcagcaaaatttaaactgtacccgtattgtctgtcacgcggttatttttatacaccgtttcctcttatcccccctaaggcataaaaaaagaaactgcacgcgatgcgcagtttcttcacacttgaatcatattgacggaacgtgctttttttgccttccgcagcccgaaccaccataaaaacagcataaacggcagcatataatatacccaatgattgagggcggtcagaataaaatcgtaagaaccgtgcagacatgaaggcacgatcagcgaaatcacaagccacttaacgcgggcttttttctgtgaaaagcgggcttttccgagataaaagcccataatcaccccgatcagcgcgtggcaggagaccggcagaagagccctgatgaaagcatgctcaacaccgtggccgaataaatagagaatattttcaagcgtggcaaagcctaacgacacactggccccgtaaacgattccgtcataatgctcatcaaaatgagcatgcgggtacacactgatcatcagaacaaaccatttcaccgattcttccaaaaaacctgaagacaaaaaagaaacgaaaaagcttcctccccctacatgctctttttcaagaacatattggataaacatggtcggaaacacgagtacaactccgagaaaaaaagacctcagcaccatatgtacgggttcattgtcatactgatcttttaaataaaaatagcttaacagcgcaatgccgggagcgattcctgcagagatgattgcaaacatcaggcaacctctttcctttatattcctatatctatcgtaccatgttgttcatatttttacatctttcaatttctaaaaaaagagcatatgaatgatcatatgctctctgcacccagccgttttgaaatttcttttgcgatcaagccgccgtgaaaacggccgttttcgataaaaatttcattggcgttatttcctgccgcaatgactccggcaataaaaacaccgtcaacatttgtttccatcgtttcttcccggaaaaacggtctgcctgattctgcatcaatctggacaccgattttttcgagaaaaccgtgatccggatgatatcccgtcatggcaaatacaaaatcgtttttcagcctgaccgtctcattccggcctgagcggaaaatgatctcatcttccgtcacttcttcaagacaagcgccgaattccatccggatcgtgccgtttctgacgagggcctcaaactcgggcagaatccacggcttgatgctcggggagtattcattccctctgtaaagcaccgtgacgcgcgcgccggacttcaccagttccaaagccgcgtccacgcttgaatttttcccgccgattacggcaacatctttatcaaaataaggatggccttctttaaagtaatgaaataccttaggaagctcttcacccggtatgttcatataattcggatgatcataatatcctgtcgcaataatacaaaacggagtgagatagcggtcttttgacgtttctacaagaaaacggccgtcttcctgttttgtcacgcgctccaccgtttcaaaggcgtttacgcgcagctcttttcttctgacaacctctctgtagtacgagagagcctgaattctgaccggttttctgttttccgtaataaaggcgacatcgccgatttctaatttttcacttgaactgaaaaacgtttggtgtgtcggatagttataaatgctgtttacgacatttcctttttcgatcacaagggcgttcacgccgatttgcttcagatgtatagccgccgataatccgcaaggacctccgcctattataattgctttttcttctgtcatgtccttcaactcctgcgattggcatttccatcataagtttccactcatataaaaaatctcctatatcatcataggagattttttttgtttatgcaaacgattggtttatatccagcctctgaagcgcgaagcctccgccattttccgcacgccgaccatgtaagccgcaagcctcatgtcaatccggcggttttgggacatttcataaatattattaaacgattttaccatcatattttccagtttttcttcgacttcttcttcactccagtagaagccctggttattttgaacccattcgaaataagaaaccgttacaccgccggcgctcgccaaaacatcgggaacaagcagcgttcctttatctgtcaggattttcgttccttccagtgtcgtcggtccgtttgccgcctctaccacgattttcgctttaatgcggtcagcgttttcatctgtaatttggttttctatcgctgccgggacaagtatatcacagtcaagctcaagcagctcctgattcgtaatggtgtcattgaaaagcttcgtcactgttccgaagctgtctctgcggtcaagcagataatcaatatcaagaccgtccggatcgtaaagacctccgtacgcgtcagaaattccgacaactttcgcgccggcgtcatgcataaacttagccagatagctgcccgcgtttccgaaaccttgtacgacgacgcgcgcgttctgaatatcaagaccttttttcttggccgcttcttttatgcagatggtgacgccttttgctgtagctgattccctgccgtgggatccgcccagtacaagcggttttcccgtaataaagccaggtgagttaaattcatcaattcttgaatattcatccatcatccaagccataatctgcgagtttgtaaatacgtctggtgccgggacatctttagtcggtccgacaatctgactgattgctctgacgtatcctctgctcagtctttcaagctctctgaatgacatatttctcggatcacaaacaattccgcctttaccaccgccataaggaagatcaataattccgcattttaaactcatccagatagaaagtgctttcacctctttttcagttacattcgggtgaaaacgaataccgccttttgtcggacctacggaatcattgtgctgtgcacgatagcctgtaaatattttcacagacccgtcatccatccgaaccggaattttaaccgttaataatctgagcggctctttcagcagttcatacacttcttctggataccccaatttttccagagctttatgtattacggtttgggttgattttaatacatcatgtttgtcttcttcattatgaccggtgaatcgatcggcttccatttgagttaacctcctaaaatcttctgtttctctcatgctccctttcagtgactagtatacaccttcaatatctccgtgcatagaagaaagacaatgatttttccattatttcgcttaaaaaaagacggccgctgaaaacagctgccgtttcgtctctttttttatgaaaaatgtctctcgatggtctccacagcattgccgtccatgatgagttttccgtactcatggagcctgtaaatcgtaatcgtcgcagggtgcccgtattcggccagcaccgcgacaacgccttctgcagaacgggagccgaggtcttcaagacttacatagtactggtcctcatagtggtagacggttccgccggtaatcccgatgcgatgaaggctcccggcaagctgaatgatatcttcaaacgaatggaactgataaataatatccgggctttcgtcaagtttgacctgcatctcgatataatcgtcgtcatattcgtcgtcttctgcgtccgcgtcatgatttttcgtgacaatcacaaccatgccttgtgcctgaagagaatatacttccaccgcgatcggaccattcgcttcaaagccgagctctgtatttgcttcattcatcatatctttaaataactggtggactttaaacgagtccttccagaggtcttcttttgtcagtccccgatcagtcagatcgtcgagggttaaaaagattttaatcttattatagttcagacgctcaagccgcataatgttccctcctgcctcttcttgcacacaaatcatataacacagtatatgaataaatgagtcataggttcttaatttgttatcagtttacaccgtgtacagcgggaagacaagcagaatgccgttttttatcgactcggccggatttgtttcaggaaaacggctcatccggtccgcacagggtgatgatatgcgtctcaggtttcgctccgagcctcagcggaacttttgtcgtcccgtagccgttgctgatcaggtaatgcgctttctttaccgttcccgtcccgcccaattcatacggaccgaaccggccgaaacggatttggccgccgtgcgtatggccgctgaacacagcgtcaattccgtcagactcattcatctgctcatggatgcccgggttatggcatagcagaaggtttactttgttttcgtccgtatgtctgattgcagattcgtaatcatccatcatcattctgatatcatccaccccgcagatcgtaaccgtttcccctttataagcaaactgaaccgattcatttctcagcgggatcactttatatgcctgaagaagagaaagcaatttttgctggctgacctcgtaatcattatttccccacacataaataacaggcgcaagagcagtcagacgtttgatgttttcctcgattctggcgtatggaactccgccctccgccaaatcaccgccgagcaaaacggcatccggcttataaactgatgcttcccggagaagcttttcatcaattaaacggcggtgcacgtcagatataaaaaagatggtgagcggcttcatccctttcattttatcaagcataaatgtatgtgttttcaggtggctgccgtttgccgttttgtacatgacagccgccataaccgcagccgctcccgccaatgagccaagaattcccgctgtaagcttcataaacgcactctccattctgtcattgtcttacattagacggacaaacaaaaaaagacgtttctatcctttccggaaaacgcctctttttatttgctttcaaaataaagattgatatcataccgatgtttcatcaggtgaaaaacagattctctcgccccccatttttccggctggggccataaatccgtgcttttttggataatttcacatctcagcttatgaaattcaccctcggctttttcttccttttttttaaaataataagaagtgcagtacgcaaaagcggaagccataatccagcacaaataaaccgtatggcctaatatttcctgcagaatcagctgcggagaagcttgaggggcattgaagcttttaaaaatcagcagtacgcacatcagggaaaagcaaacgagggacgcccactgccatcttcggcattgcttggcataattttcgtattttaatttccgtttaaccagcgcctgaagcatttgtttcgtcggtccgtcagcaaatcggtctaattgcttccataaagaatccattcgcttcacaccttgtccgttttcattggtacactatatgaaagccgcggtgaaaatatgtatttattcggaaagcgggatgttcagaacctggcctgtatacacatcgtttccgtttaacccattgtaactgcggattttttcttcgcctgcacggcttttataatatttcattgaaatgcggtaaagcgtttctttcggctggacagtatgctggacggtccgcactttttgctggacggtctccgcttgatcactgccggcagccggaactcgcttttcacggacagccggcggagactgctgttttgtctccgcgtattcggtttctgtcggctttacctgtttttctgaagctgtttccgtttttttcggtgttttttcactcggtttttctttcgttttttcagatggagccgcttctttcttttctttgtcctcagactttttttccggcttttttaaaagagcggtttcagatgtttctttctgcacgtccgctttcggaatcacggcaggcgcgctttcactgtggtctataaagacatcttcataatccttcgggtcaaatctgctgctgtttgtcatatacagaagaccgaaaaagacaccgattgtcacaacaataaacaggacggtcagaaaagtgaacagcggcgtttttgttttggttttttccttcacctgttcttccttttttttacgctcctcttttacagattgtcttgtcgggaggctgtcttcaagatattcaatttgttcatccgcggccgcggcaatctgctgctcggcacgcagctgctgagctttttttctttcaactcttgacatttccgtcatgcaaacccctcctaacatattgaaaacggacctgacaggcaaataccgcatcaataataaaatgtgctgtaaccggaacgaataaattaccggtccattcatagataagccccagcaaaagactgatgcccgcaaccataataaacagaagccatttcgccaagtatctgaaatgaagcacggtaaaaataaagctggccgcccataagccgatatgtgtctgcagaacgcctctgaataaaatctcttcgctgaacgcaatgagaagcgtcaaaaacaaaatgtgcaataccggccttttcttaaaaagcaatacattaataccgccgtcatcatataaatgcgaaggacaccatttcatcaccgccagatcggcaaaaatgacaaggacagcaagagttacaccgtaccatatgatattatcgtcacgtatatgccacagctttaaaaaatcgtgaacatcggtaaaacagaaaaagccgatgacagcagaagccgccaatatgagcaattgggtggcataaagctgtataacaatctccctgtctgagagctgatggatcaattcgctttgccgtttcagctgaactcacccgcagactctaaaccgaaaatccggtctaattccagcttccaatcttcaaaccgctccatgtttttccgttctcctttttgctcgtatggggtcagatccattccgcagctgctgcagcattgcccggttggaccttcaggctcatacgattcatcaaagtaagctaatagcgcttctcttatacattctttccgctccaataacgccgaaaagcggttcattttatgcagcttcttttccacgcggcatgtcagttcttcttgcagctgctctttattggtttttccttgcaggtacaggtggatggccgttcgcgcctgtgtttcctgaacgcccttgcttatcagaacatcccgaagctttcgctcatcgcttgtaccggcgtcccgtatgacggccagaatgccttccaggtcgtaatcggacaaactttctgtctgaataatctgctgctgaagctcggtatcgcccggcgctctcagcaaaatactgacacttgggctgccgtcgcggcccgctcttccgatttcctgcataaaggcctcggccgtttggggaggataaaaatgaataacaaagcggatatcagacttatccacacccatgccgaacgcattggtgcagcaaatgcaatcaagctggttatggataaattgctgctgaattaatatcctgtcgcctgtatccattcccccgtgataataatccgtccgctttcccgttttttcgttcagctcggccgcaagctcttccgcccattttctggtcggacaatatacgatgcccgggccctcgagcttttcggcaagctctgtgaccctgctgattttttcggcattatcagccacatgttcaatcgccaagagaatattcggccggttgaccgaatatagatggcgcaccgcatgctcaagtccgagcacatccgtcacatccctgagcgtttctttcgtcgctgtcgcggtcagcgccaatacaggcggcttgccgagtgcttgcctgaaaggtccgagctttgaataatcaggcctgaaatcatgtccccactctgatatgcaatgagcctcatcaatgacaaataaactgaccgggacgtttttcaaacgattcagcacataaggtgacgagagggcttcaggagacatataaagaaatttgtaacggctgatgttgctgaggacaaaatgccgctcgtcagaattcagcctgctgtttaatgccgcaacccgcttttctcctttcgctttcagctgctgcacctgatcttccattaatgaaagaagaggtgaaataatcagtaccagcccgtccattatgtaacccggaagctgatagcataatgatttccccccgcctgtcggaagcatggcaatcgtatccttcttttgaagcacgctggtgatgatttcttcctgcccttttttaaacgaatgcaaaccaaaattccggtataaagctttgtgcagctcagtcatgctgtttcaccgtctttgccagcgccagcctgatctgaaaatagctgaagcgcatctgcattccttcgcgaatccgtttaattttattcgtttgatgctgttttgcaaatgccgttatcatacgctgttcctcttcagaaatgtactgttctataaaaaatgcaggctgatgcagcgatatttctacgatatgatcttcgattgtggcagtttttaaatttctgattgcggcgatccgttcaatcggaaaccctttttccaagagctcataggtttttctggcagactgcgtgagcgcgctttccgactgcaggtcggacaacagttcgcgcagagctggatgtgcacattgcggaagcgattgaataacataatgtaccgctccccaaaactgaacggacacataccattcatcttcgttcagctgaagagcgagctgcttattcgtgctgccgattctgtcgaatgaggttagagaatagacgaaaataagcgcctgccgttcacttacgccttgcagaagctgaaacagcgtgtcatgcatttggacggagagttctttgacatctctggttttccgcataaaccgtttgacccatctcagcgtctgtacatcgtttgtaaccgggatatattgactgcattgatgctctttgtttgacaggacttgaatgagcagggacagccgcttccagaggatgacagccggcgtttgataattcgcgccgtggcagtgcttcggccaaggccgctctgcaaacgcccgttcaagcgtttgaacgccgcgtgcagtcactttccacgttccctcttcttttccggctgtaatgtatgagtctccggtgagtttatgcatcgaagcagcaatatcgccgcgttcgcactgtgaagccatgccgaaatatttagcgatctgaaataagcccgcatcctgaatggtttgagacgacttttttccttttaataaatgaaacacggcactcggagtccgttcgccgtctattttgtccagacagtcgagaaccacggtatcaaagtagtttatcgccaatctcaacacacctacatttcttctctcaacaagtttcgtttttttgttctttttattttaacagattttcatataaatttgacgtttaaagtcatcttttagggggaactgctatagagaatcccttatgtgataagcattctcaatcatttttctgttgaaatttgacaccaacatcattacaataagtaagaggaataggtgttatatttaaaaatatataaggtaaaccatttgttccaacacgaacaatctgggaggtttttttcatggcaaagtacacaatcgtagataaagatacgtgtattgcatgcggcgcttgcggagctgcggcaccagacatttatgattatgatgatgaaggcattgcattcgttacgcttgacgaaaataaaggtgtcgtcgaagttccggaagtgctggaagaagatatgattgacgcatttgaaggatgccctactgattcaatcaaagttgcggatgaaccgtttgaaggcgacccgctgaaatacgaatagaaaagccctccccgtgagaggagctttatacgtgaataagactccggctgttatcggccggagtcttatttttttgccgatccaacaaacaaaaaaaagcgcccggcctgtgttttacgaggcggacgctttcagtcattattgtgtttgaacgctgcgtttttgctcaatccaaggtttaagcttcgtaaagatgaacgtaaatacgatggtgatgataatgcctttcacaatgttaaacggcagaattcccgcaacaaccgctgtttttaactggctgtttgacagtgccggtgaatgcaaaaaccaagtatacgcgggcaggatgagaatatagttcaaaatactcatcagaacagtcatcgccgcggttccggccagcaggctcaccgcaagcccttttgcagacttgagttttttaaacataaacgccgtcggcaggataaacagcgtccccgcgataaaattggccgcctgcccgacaggcacgccggccatgcttccttgaatgatatactgcagaatatttttaatcgcttcaaccgcaatccccgccgcaggcccgtaaaccaaaatggcgataattgcaggaacgtcactgaaatcaattttcaagtaatccggcagacccggaaacgggaaatttaacagcataagcacaaaggcaatgctgctaagcatactgataacaactaatttttttactttcacaatgctctctccttttcgatcaaatctctcgaaaagaggaaaggttctttacacctcaataaaaaaaccgcttttataaaaaagcgggagtttactaaggcttagcaaagaaacgtttgatatgagcatcaaaacgtctgctgaacctccatcttctcccatccagactatactgtcggctccggaatctcaccggatcctgccgccgaagcagctcgcgggcttagagtatgatactcatcaccgccggtagggaatttcaccctgccccgaagattgatcttatgaatttattcacattatatatgatcacattgcaattgtatagcgaactgctcaattttatataaaatattggcgaaactcattttttaactgaatgagcggtttccttttctcctttactgcgtcaatacgcattgacactctattgagaatatgataaattatcagatatttagtcagctaaactaggaggaaatctaacaatgtttcgagttttggtctcagataagatgagcaatgacggcttaaagccgctgatggaatcagactttatagaaattgttcaaaaaaacgtcgcggatgcagaagatgaattacatacctttgatgccctgttagtccgcagtgccacgaaagtaaccgaagaattgtttgaaaaaatgacctctttaaaaatcgtcggcagagccggtgtcggggtggataacatcgacatcgatgaggccacaaaacatggagttatcgtgataaatgcgccaaacggaaacacgatttcaacggcagagcatacattcgcgatgatttcttcattaatgagacacatcccgcaagccaatatctcagtaaaatctagagaatggaaccggacggcttttgtcggggcggaactctacggaaagactctgggaattatcggtctcggccggatcggaagcgagatcgcccagcgcgccagagcgttcggtatgacggttcatgtgttcgatccgttcttaaccgaagaaagagccggcaaaatcggggtaaacagccggaccttcgaagaagtgcttgaaagtgcggatatcattaccgttcacacgcctttaacaaaggaaacaaaaggactgcttaatagagagaccatcgccaaaacgaaaaaaggcgtccgccttattaactgcgcaagaggcggaatcattgatgaagcggcgcttttggaagcactggaaagcgggcatgtcgcaggcgctgcgcttgacgtgtttgaagtggagccgcctgttgaatctaaacttcccgaccatccgttagtgattgccacacctcacttaggcgcttcaacgaaagaagcacagctgaatgttgcggcgcaggtttctgaagaagtgcttcaatttgcaaaaggcctgcctgtcatgtcagcgatcaacctgccagcgatgacgaaggatgaattcaaaaaaattcagccttatcaccaaattgccgataaaatcggaagtctcgtgtcacaatgtatgaaggaacccgtcaaagatgttgcgattcaatatgaaggcaccatcgccaaatttgaaacatcgtttattacaaaaagcctgctgtccggcttcttaaaaccgcgtgtagactcaacggtcaatgaagtgaatgccggcggtgtcgcaaaagaacgcggaatcagcttcagcgaaaagatttcctccaatgaatcaggatatgataactgcatcagcgtaaaagtgaccggagaccggagcacctttacgttaacggctacgtatatccctcacttcggtgaaagaatcgttgaactgaacggctttaatattgacttacatcctgccggccacctcgtatatatccagcatcaggatacgactggcgtaatcggacgcgtcggacgcatcctcggcgataacgatatcaatatcgccaccatgcaggtaggccgtaaagaaaaaggcggagaagccattatgatgctttcttttgataaacacctggatgataaagtcgtcaatgagctggcttcaattcaggatattgtctcagttaaattgattgaccttccgtaacagacaaaaacccaaaacatataaatgttttgggtttttaacgtttaatggatgggaagcggattaggcgcggcaggcacagcgattggttttgtcacatcataattaccgactttctttgcacgcgcatgtgtgaacagcacctcagaaaaaccgaattccttcgcggttaacaaaagtccttcgatcattaaaatcccttctagcgaatcttccaccgtatgtttttcggacaattggatttgcagctgccggccgtttttattttcggatactgatgcaatcgcatctgcttcaatgacgcctgcggtctgtgagtctttatctgttttcattccgtcaatggcttgctctactgaagaataggtttgttccgacggaatgagatactcttgtcccagattgtcacggtaagaaaaatacgcccgttttgcctgcttatgtacggacatctcagcggcaataccgtatgctttataaagatcctgtcctgctccattttgaatctttgtcattttaatccgctcgtaaggactccaggtcaaagtctctttcagcacctttttcaataaatcagcttcggccactgattcaattgatagccgtccgtttacttgtacaagcagatccttcttatccgcacttacttgaacaccgtccaaaagccggggtacagacaggaaagattcgggcacttccaggttttctgcctcggataaagcctctgaaaccgattcgtcgggcttccttttttcaaaactgatcggaataacggcggatgtttctgaatcggcaaacgccaacgtaatgtatttgtttttgttttggtttgagacgacaaacgtcttctgttccggcttgactgaagctgactgactggctttttcagcctgactgctgtcagctgtaagatcaccggaagattcgtttcttgtcagcaggtgaggagatataatcagagcgatgcacaatgcgcagatggcggctgttgcggggccgatcctgcttcgggccggtttttttctatactgtttacccgtttcaatattccggtaaatggcctctggtgaacgatgatctctaaccgccggaagttgtcttaacaactcctctactctttcttcgttccaatatgacttcatcatccattagctcctccctcaaaagctccatctgtttccgaagtattttgagccctctgtgttgggtcgttttgactttgctttccgagaagccgagagcggcagctgtttcctgaatggaatatccctgaataaatctcaagataataacagctctttgatcaatggtgcagtgatcaagcgcggtataaatttcccggacattttcatgctgtacggcgagttcgtccggaagcaaatgctgatctctgacatcttgtgtatcccaatcaaacgtacccataatacgctgtctgatcgtctgctgcttgcggaaccagtcaatcgccacatggcgcgcgatggacaacagccatgttttttcactgcttctaccttcgaatgtatgataggaattcaagacgcggatatacacttcctgcgccaaatcctcagcctgtgttttatcttttaccatataaaataaaaattggtataaatcttgatgatatgcatcatataatatctgaaaggtttcttccatgggaagcccctccgttcacttttttgtcgtataaatgcgttgaaaagttacattacaactatattacgagaaactggaatttggaagggaatttatattaacatattcttaaatttttaaaggggaaattaacaaaaaaacacccgcatgttctgcgggtgtttcgtatggaacaagattgttcgtcaatttcagacgccatcctgcacttttgtcggaatataaaatgtaaacgccgtccctttgtcgatgctgctgtgcaccgcaattgagccgccgtgcgcttccacgatattttttacgatagcgagcccgagtccggttcccgccctgccccttgttctcgccttgtccgctttataaaaacgttcaaaaataaaaggcaggtcctcttcaggtattcccgagccggaatctttaatatcgattttcagtccgtcttttacggtctgagccgcgatatgaacgcttccgcctgactctgtatgacgcagcgcgttgtctataagattggtaaacacctgttccattttgtcttcgtcaaagacacactccggctgagacaccgcaatgtcttctgtgagcgaaacccctttttccttcgctaccccggaaaatttgcgggaaatcttctccagaaattcatgcaggttcaccgtttcatagtgcagacccgtatgtccggattccattctggccaagtccagcaagtcattgacaagccggcccatgcgaagggattcatcataaatgatctgcgcgatttcttttttctcctcttcggtacttgcaatgtcgtccactattgcctcactgtatccttgcagcatagaaatcggagttctgagttcatgactgacattggcaatgaaatcttcacgcaatttatcaagcctgcgctcttcggtcatgtcacggagcacggccacggcgccgcggacgtgtgattccgcataaagaggcgacatcaataaaacccatgaccttccttgaagcgtcatttcaatcatttgctctttttctgtgctcacggcattttgaaaaagctcttttgcttcaggaggaaggttgtctccttctttaatgttcatattctgctcgtaataccaagcctgcagaaaacgttcggccggcgggttcgtcaccaaaatggtgccgtcgatattaatggtgatgaccccgtctgccatactgcttaaaatattcgacagctgttctttttcctgattcagcgcgttgatatggaaattgagctgccggcccatctgattaaaggcaatggccagttccccgatttcatcttgagtcagaatcggaatttttgtatcaaacttccctttcgccaagtcctgggcgccttcccgcattttccgaagcgggtacgtcaccctgctggataaaaagaacgcgaaaaacgttgtcaaaacgatggcaattcccgccgcaagaaagatataccgtgtcgtatgtttcgtcgtatctttgacggcaagcagcgactgagataaaaagaccatgccttttttgccgtctttttcatacggcacgccgacgatcagccgttcgttatcggaaccggcatcattgggcgccgcgcgtttgcttacttttttgcggtctgtcagcgccttgtgcaaatcccggtcgcgtttgatctgctccaatgtaatagatgataaatgattatcgtcattcggcgaataccagacgtgctgatcatcctgaatgatcgcgatgctcgttaagttgtccgccagctcccacgtgatggatctggcaagcggctggtcttcatgattttctataatgaccgctattttatcggcaagctgcgttaaatctttttccgcttcttctacgtggtaattctctatgaattcgagaagcagcaccgttaaaataaataaaacaattaatacgagtgaaagaatggtaaaccaaagctttcctactacgcttttccaaaacttcattcagcgcctacctcaaatttgtaacccactccccagacggtgacgatttttttcgccgctcccggagatactttgtttaatttttcacggagccgttttacatgggtatccaccgttctaaggtctccgaaaaattcatactgccatacttcttttaaaagcttttctctgtcatacactttgtccggtgttttcgccagaaaatacagcagttcgtattccttcggcgtcaggctcacttccgtgccgtccgcagtcactctgtgagcatcgtgatcgatggaaagatgtgaaaaaacgagcacattttttgtcggcgtatttgctgtcagataggatgtttgagaagctcttcttaaaagcgcctttacccgaagcaccacttctctcgggctgaaaggcttcacgatataatcgtccgtacccgcttcaaacccctgaacgcggttggcttcttccccttttgccgtcagcatgataatcggcgtcgcttttttttctctgagctgccggcatacttctattccgtctgttcccggcatcattaaatccaagagcaccagatcataatctgaggccagccccattttaatggcctcatcgccgttttccgcttcttcaatcacatagttttcccgttcaaggtacattcttaaaaggcggcgaattctggcttcatcatctactactaatattttagtttcatttgtttgatccatcgttttccccctgctttccttctgttactttcattttaacaaactgtgcggcggcttgagaactgtatcggctttcggcatctatgcgtacgaatgaagtccggcaagcacgagatttacaaaaattaagttaaacataataatggcaaagccgatgacggcgagccatgccgatttttcgccatgccagcctcttgacagccgcaagtgcaagtatgctgcgtaaaataaaaaggtgatcagcgcccatacttccttagggtcccagccccaaaaacgcgtccatgcaagctgcgcccaaatcatcgcaaacacaagcgcgccgagtgtaaataccggaaatccgatggaaacggcgcggtagccgacttcatctaccaagtcgagattcacatttttgacgagcgggcttaaaagagcgctgattctctttctgaatatcagcctgagcgcgccgtataagacgagacctgcgccaaacgaccagatcaccgtattaacctttctgcctgaaaaaatggccgggagctcaacaaacggcttcattgcgccttctgtaagcagttctccttcatgcggaccgacaagcgcaggcatatcatataccatgacgcttttggcatcttttttatccacccaattaaattcggctttgtagtccgccagccggaatgccgacgtgacggcgataaatgccacggtcgtcacgaggataaacatgatgacttcgagccagaacgtttttttgcccggtctggactgatcgacatgctttaacaggaaaatgactccggctacaaagctgatcgcaagaatcgcctgcccgagcgccgccgtcgtgacgtgaatgtacagccaattgctttgcagtgacggaataagcggcgtaatgtcggtcggaaacatgcttgcgtatgcaataagcaacagcgcgatagacaatgtgaacatgcctaaagacggcagtctgtaaataaagtaaataataataaaagcgagaacaagcatcatgccgaatgacgtggtaaattcaaacatattgctgacaggcgcgtgtccgcttgccgaccacctcgcaatgaagtagccgagatggcaaataaatccgagaatggttaacgtgattccgattgccgaccagcggcccttaccgtcctttgcaccttttgttccccggatggcgccgccgaaaaccgggacggcaattaaataaatcaaaaaggcagcataaagaaaatttgcgctcagctccgccatgacaccactcctttttcattaggcctgatttttgaccagttctttttgatcggccggctctttaatcccggtcccgttaagaacatattcaatatcctttttcaaaccgaaccagtttttgttcgtatgacccgccacaagcacttcattttcaccggttttgatccagattcttctgtgctgccagtacattccttgaatgacgccgatcataaaaatcgcgccgccgacggcaagcacccataaggttaaatcttttctgacggtgagtcctgtaatgtttttcgtttccacgtggtcgaattttaatttgtacttgttattcgcggaaccttcaacagtctgctgaatcgcaacaaagcttttctcccctttcggcttgtcaggagccgtaactttaaagacaaaagccggattgttcggaaccttcgttttcgtgctcggttctccgtccttgttaaaataaaaatcaggaagataactggcgatctgcactttgtaaccgttaccaagatcatagtccgtgtctggatcaagaagattgatcttcagtctgccgaatgactgttttgttttttggtcgatcagctgaaacaccatctgatcgagctggttttctttatagtccacctgatacacggaataggagtcgaaccgcagcggttcattgacgcggatattgttttctttgactcttttaagcttcggcttttcaccgaatacaatgtcgccttccctcttgtacaaaattgcatccgtattgaaggatttggcgactttgccgtttccggctctgtcaatggcgtcggcgaatacttttttctcagtgtttttgttatatgtctgcatggtgaaccgattgtttttcaagtaatatttgccgtcagtgccgggaatctgggcggtttcgccttcacggacccagagggtttcatcgacatacatccccgggacaaacctcagcatggctccgatcagaaaaatgatcaggccgatatgattgacgtagggcccccaccttgaaaagcgccctttttccgccagaatgcttccctcttgttctcgcactctataatgcttttttttcaaacgtgttctgatgccatcagccgcctccgcgctcagaccggtttccgtccggctgtatagacgctgcctcttcaaaaagaccggattccgctgaactccttgatttttcagcgctctgtacagaggaatcacccgatccaggctgcagatgacaagtgatatgccgatggatgcgatcaggagcatataccaccatgaaccgtacaggtgatgaaatcccagcagataatagattttgccgattataccgtactgctgttcataatatgtatccggctgggcgcccggcggcagataagcttcctgcggaaaaaccgtgccgaatgctgaagccgccagagtaatgacgatcagccatattccgactttaacggaagaaaagaaattccatactttatctacgattgttttgttatatgtttgcgaacgtcttgcgctgccgtcgtaccgcatatcggcaagcggcgacttttgatcatcaagaggcttcccgcacgactcgcacaaaactgttccggctggattcacgtgcccgcattcacatttgacctttttcatgaagacgcctccggcttaattaaattcatatagtcatgaaccatgcgttctgtcatcgtgccggtcaccactttcacgacttttccgtcgggattgatcaaaaaagtcgtcggtataggcgatacgccgtacgcgtccagcacttgccggtcagtatcaagcgcaaccgggaaattgacgccgtatgttttcataaaattatgtactgcaatttttgattcgccgacatttaccgcaaccacctctacaccgaggtctttaaaatacttatattggttttccatataggggaattcctgcttgcaaggctcgcaccacgttccccagaaattcagaaaaacaccttttccttttaactgactcagttctatgtttctgccctctgtatctttcagcgcgaaattcggggctttggacccctcagatatacgctcgccgtttgtgtaaacagcgttatagatggtatatccgagcgcgcagagtaagatgagaaggatgccggtccgaatgaataaacgccgccgttttttgttcattgtacactgctcccctcccctgcctgcaaatccattcaattatatcatcttcacgttttgtaatttttgaaggttatgtgaaaattagaaagcgtttttaccgtggtcggctaaagcccgcagccttttcacctcatgcggcgtcaattctcttgcgtctcctgtgtgaaggcctcttaaatctaaaaatgcgtattcttcacgtttgagtttcagcacgtcatgaccgatcgcctcgaacatgcggcggacctgtctgtttcggccttcatgaatcgtcagctgaatgatgctcgtctgctttcttttgtccagggaaagcattttcgctctggccggagccgtcttgccttcttcaagctgaatgccgcgctcaagctttctcagaagttccttggaaggaatccctttcactttggcgacgtatgtcttatcaatttcgtatttcggatgcataagtttgttggcaaactcgccgtcatttgtcagcaataaaagaccgctcgtatcataatcaagcctgccgatcggataaatgcgctgcggcacttctttaaagaagtcggtcaccactttccgccctttgtcgtcgtcagctgctgagatcactcctctcggtttataaagcagaaagtacacgggttcttcccgttccacctttaatccgtttacttcaatctgatcagaaccggtcacttttacgccgagctctgttattacttttccattcacctttacttttccttcttttatcagctcttctgcctttctgcgtgatgccacgccggcatgagcaataactttttgcagtctttccatgtcgttcacctcaagtataatcttacttttttccacttgaacaaacaagctttttcaaggagagttattctgatatataaaaagcgcctgattcaggcgcttccaaataataacgtaactatgatgattgatgcaaccactccgatcaaatcagcaagaagaccgacctttagagcatcccccatttttttaatgccgaccgccccgaagtataccgtcaggacgtacagcgtcgtatcagtcgatccctgcatgacagaagccagtctgccgataaatgaatcaggcccgtacacggcgatcaaatctgtcgtcatcccgagcgccgccgtacctgaaatcggacggatcagagcaagcggcacgacctctgccggaatgccgagcgccgtaaagaaaggcttgcaaagtcccatgacaaaatccagcgcgcctgaagcccggaatacggtgatcgccacaagcatcccgaccaaaaacggaatgatggaaaacgcaatctcaattccttcttttccgccttcaacgaatgattcatacgtcggcacttttttgatcgtgccgtatatcaatataccggcgataataatcgggatcatggctaaagacagccaattcaccatttccattcgcttacctcccttttcttttgcggcggtaccagaagtagcggtcaatgaaaattgcgccgattcccgaaattaaagtcgctaagatggtcggtccgacgatatcggtcggtgatttcgccgaataagccatgcggacggcaatgacggttgtcggtatcaatgtaatgctcgaagtatttaccgccaaaaaggtaatcatggaacggctggcctcagacttgttgccgttcagctttttcatctgctccatagctttaatgccgaggggtgtcgcagcatttcccaacccgaaaaaattcgccatgagatttgataagatgtatcccatagccggatgatcagggggaatatcgggaaacagcttagaaataaacgggcggcacattctgctgaatatatccaaaaggccggactgctcggctattttcatcaggccgagccagaacacgaggacgctcattaatccgaacgagatcgtaacagcttctttcgctcctttaaaaacagcttcattcacatcctgcaaggtaccgttaaacatcgcaaaaacaagtccgattacagtcagacagacccagattaaattgaccatactgaaccgcccgccgtgctcataaaaaggctcgtaaatgtttcaatgaaatgctttttcggctttttatggcgctcattttcataatagacggggatcttggcgatcactttcccgtcatgcataacggtcatccggccgacaacatcaggaatgagagaggcatcctttttccaggcttttttcggttttattaaggttgtgctgattttcacatcatcgatttcatcctcttttaacaaatatttaacatcacgggtaataaaagcgtgttttccgtaaaacgtctttttcagcttcgggatgccgccttttttggcgacgacataggttttatagttctcaaagacataattaaacatattcatatggtcatcccagtcatccggatcattaatagtgactgcgatgagatccgttccgtcttttgaagccgtcgaaacgagggtccgtttcgcgatttttgtgtaacccgtttttccgccagtgctgtaaggatagagccctgtcaaaagcttgtttttatttttccacacccggtccatcgtttccgctttatacacttttgtgcctgaaacggtccggtattccttgatcttcatcgcgtatttggtcaaaagcgccatgtcatacgccgttgaatataaattttcgtggtcatccagtccgtgcgggttttgaaattttgtattttccatcccgatttgctcggctttttggttcatcataaatacaaaaccgtcaaggcttccgccgacatattcggctattgccgcagcggcatcatttcctgatctcagcataagcccgtatacgagatctttcagcttaactttctgtcccggctgaagataaattgctgaaccttccgtttttacggcattcggggaaacagtcacggtcttttccatcttccctgattcaattgccagcaccgccgtcatgattttagtaatgcttgcgatccgccgcttatgatgttcgtccttagcgaataataccctgcctgatgttccgtcaattaaaatcgcgctttttgcgctgacatgtatttgggcatgtgccgtatttccgtctgtaatggaaaaaaggataacaaaagtcaaaagaaatacggcagcttttttgagaaagcgcatgaatgctcacgtccttgttgtgggtttgtacaagtttatgcgcatgtccatgacttatgaataccaattacatcactttacataaaaaaactctcccaaaagggagagtttttatctggctgataccatatttgagcctgatgcttcatattgcgccaattcttcccgcatgcgcagaaactcactgctgagcgaaagcagaaggctccgcagcgagtccggcactcgctggtaaaattcaatcgcgctttggcctgtatatgcggcgcggctgttttcataccatgtatcctttttcggcatgaaaaactcttccacgcactgatgatacactttatacagggttttctccgctctcgactcatgaaacggctcctgcattaagagccggcggcaggcttcctgggcgccttcgcaaaagacggtcatccgtctcagcacactgagcacatcgcggcagtatgcctcatccgcctttcccgaagcctgcatctccggtaatgttgtatgatttaaatagctgctgaccatcgtgacaacctcggctaaaaatttaccagtttcttcagtatgggccctcacaatcgaatttcccattttcgtccgtttccttcctctcttgtacttcgtcaatgtgcgtcattcatcaatggcctttccctactatcgtatgatgaaaaaccgttattatttaatatcctcaaaagtttggttgaagttttcaaagaacaagtcggcttcctcctggagaacgtcttcttccgcattttcaggaagcggcgggagctcgtccagtgtttttaagccgaattgttcaagaaatacaggtgtcgtgccgtataaaatcgcacggccgggaccgtcggcgcggccaacctcacacagcagcgcttttgacacgaggctgtgcagaatccgttcagacttcacgccccggatatcttcaatttctgcccgtgtgatcggctgcttgtacgaaacaatcgccagcacttctaaagaagcctgtgacagcccctttgacggcacttcgattaatttttttaaataaggcacgaattcttttttcgttccaagcatatacgtatccgcatattcggtcagctcgatacccctgccgtcttccttgtactgtgcggccacttcttccataattccggccagctccgcttcttctatttcaagcaccgtcaccaattgctttttggtaagcccctcatcacccgccgcatacagcagggcttccacaatcgctttccaattcacgatatcaagcgccatgaatggattcactccccgtaatgtatatatctgaaaagttttcttcctgttcaaggataatctgctgatttttcatcagctccagaactgctaaaaacgtcacgacgagatggtctttttgccgagaaggaaaaagctccgtgaagtttattcttcttcccgccgtttttaaactttttacgatttcgttcattctgtcttcaatcggtatttcctgtcttgtaatggtcgtttctttcggccgcgtgatttttttacgctgaagcactttttgaaacgcgccgatcatgtcataaacggtcaccgaaagcttctgctccgtctgtttgatttcttttgcatattcacttaaatcactcggcggcttcgtaaatgacttttgtctttcttcttcccgctcttttaaatctttcgcagcggttttatattttctatactcaatcagcttttcaatcagctcgtcccgagggtcttcttcttcaagcatttcgtcttcaaacagctcttcctcttgtttcggaagcagcattcggcttttaatgctgagaagagtcgccgccatgaccagatattcactggcgacatcaagttcaagcacttgcattgtatgtacatataataaatattgttcagtaatggttgccacgggtatgtcgtatatgtcgatttcaagacggttaatcagatgaagcagcaggtccaatgggccttcaaacgtatcaattttcacttgatattctaccattatctcaccattttcaatatcactctcattgccggaaaaactggctacccattagtataatccaccgaaatgctcgcgtccaatacttttctaatcgtgctccgttatttagaaaatactgaaaaagaagatatacgcctatacctttaaaggcggatgcacatatgatagccgtgtaaacatgaaacaaagggaggctgatttcacatgggcggagcttgtttcggcggaggatttgcattaattgtcgttctgtttatattgctcgttgtcgtaggggcatcttacatctgctagttcatcaggcttcagacaccaagccgctcttttttccttttcatagcgctgtggtacactgggtttagcataaaaggaggaagcggcttgtatccaaaagcttatatcggctttttggccgaatttcacgcatcaagagattattttgagtgtcatgaactgttagaggaatattggaaagaaagcccgcctggggagcggagcattcattgggtcggcctgattcagcttgccgtcgctctgtatcaccagcgaagggggaatgaagccggggctaaacggctgattgccaacagcttacgtattctgcggtctgaaaaacaggctgtcagctctctcggtctcagtcatccgaagctgattgagctgatagaatcgctgtcagacaacatagaagcgggcctgccgtacaaaagtgttatgctgccgattacagatgaaactttgaaagaagcatgtcttgccgaatgccgccgcaagggctatatatgggggcaagacggtgtatccgatacctttcttattcataaacaccgcctgcgggacaggacggatgtcatcatggaacgcgaacgggaaattgagaaaagaaaaaaaagcagaggctgacggtcagccctgctttttctatataaaaacagctcccgaaaccgtgatgattccgggagcatttgtcagttattatatgaaatatcctgatctttttgatgttgacagcgttcaaaaaagctttgcgttaattcattcggaacgagtgcctccgttttgaacagacgttttaaggcgtccatcatttgctttccgattccttgatggcggtgagaaggattcacgctgatatgacggatttcaacctccgagtcttttttttcgactccgatcgctccgacgatatcttcatcctctttccaaagaaagagctggcggccagtatccgtttcatagtccttcattgtctgctgaagctgcttaagatctttttcattcggcataaatgacagaagacccatcgcaatcttttcaaacgattttttataacgaattaacataaaaacccctctatatccaaaatgtccattcatgtcctatcaaacggatacataaaggcgatccgttttctcacattatatcattttcgccgcggttttaaacgcttttcaacaaattattcaaatgagcggtttaaatttgccatttcaatggcggatactgcgcagtccgctcccttatttccggcttttgttccggcgcgttcgatagcctgctcaatggtttcagtcgtcacgatgccgaagataaccgggacgcccgtcgccgttcccgcctgagcgatgccttttgccgcttcgttgcagacatagtcataatgcgttgtcgctcctctgatcaccgtgccaagtgtaatgacggcatcgtattttttcgtttccgccattttttttgcggcaaacgggatttcaaacgctcccggcacccaagcgacatcaatgtcatttgattctacaccgtggcgaatcaatgtgtcttctgctccgcttaacagcttgctcgtaataaattcattaaatctgccgacgacgattccgattttaagtcctgttcctactaggtttccttgtatgatattcatatgttatccatccttttttgtgagatttgtttttagaaatgaagcaagtgtccgagttttttcattttggtttgtaaatactgcttgttgtgctcactcgcttccatttgaagcggcacccgatctgaaatgcttagtccgtacccttcaaggccggcgattttccgggggttattggttaaaagtttcatatgctgaacccctaaatcgcggagaatctgggcgccgatgccatagttgcgcaagtcaggcagaaagccgagcgcttcgttcgcttcaaccgtgtcgtacccttgttcctgcaatcgatacgctttcagcttattgatgagaccgattcctctgccttcctgacgcaaatacaatagaacgccgcggccttcttcggcaatttgcgcaagcgcggcatgaagctgaggcccgcaatcacagcggtgggatgcaaacacatcgccggtcaggcattctgagtgcactctgacaagaacgggtccgctgttaaacgggacatcgcccatgacaaaggcgagatgttcttttccgtccacctcgtttgtatatccgtaaacccggaacgtgccgaagtcagtcggcagcgtaatgtcaacttctctgttcacaagtgttgtaatgttgtagcggtattctattaagtcttttatcgtaatcattttcagctggtggcgtttggcgatctcggctaactctggcactctggccattgtgccgtcttcattcataatttcacaaatgacgcccgctccttgagaaccgcatgcttttgcaaggtcaacggctgcttccgtgtggcccgcccgcttcaggacgcctcctttttttgcgattaagggaaaaatatgacccggacgctgaaaatcgtcaggcacagattcttcgtccaaaagcgcctgaatcgtaaaggaacgttcctgagcgctgattcccgtttttgtcagcttgtggtcaatgctgactgtaaacgcggtctcatgtgagtctgtattatgatcgaccattggatgaagatccagccggccggcgatgtcttcagaaagcggcgtgcagatcaggcctctcccgtgggtcgccataaaattcaccacttcaggcgtagcatgctcagcgagcgctacgaaatctccttcgttttctctgtcttcatcatcgacaacgatgatgacttcaccttttttcagcgcttctaatgcctcttctatcggatgaaacatattgatctccctttctaaaagccgttctcgcttaaaaaggcttctgtgatagtttgattgcttttcgtttgttctgttttgtgcaaaaagcggtataagtatttgccgatcatgtcgcactcaatattgacgatcgagccgactgctttcgtccggaaaatcgtttctgagatggtatgcggaatgacagataccgtcacactttcgtctgataagccgaaaatcgtcaggctcacgccgtctaccgtaatcgaacctttcaatacgagcgttttcgtcaattcgggagacagctttaagtcgtaatagaccgcgttgctttttttctcgatccgtgtaatttccgccgtcccgtctacgtgccctgatacaaagtggccgccgaaccgtccgttggcggacattgctctttccagattcactttactgccttttgacaagccgttcagcgaagtggctttaactgtctccggcatgacatctaccgtaaattgattgtcagaaaatccggtcacggtcaggcagatgccgtttaccgcgatgctgtcgccaagcctcacatcacttgtcacttttgaagcggcaattgttaatgccatggaaaggcctgtctttttgattgcttggatcgtgcctgtttcttcaacgattcctgtaaacatcgtcaccatcctttccatctttaggtatggccgtcagttttatatccggcccgatttgggtaatttgtgtgaattgtaaatgggggacatctttcattgattgaaaaccttcaccggagatcaagctgggagcaagcgttcctccgattaatgtaggggcgaaatagaaatgaagctcgtcgaaacagcccgccttgacaaaacttccgtgtacagatgctcctccttccacataaacggacattatgccgttttcagcgagaatgctgagcacctcagggatgtgaatgcggtctgtttcaagcgtaaagacttttattccgagtgcggtcagccggtctttctttcggacgtcagaacctgcggctgtaaatatccatgtcggcgcagccccgtcagtgagcacatttgccgtttcaggaacggtcagctttgtatcgagaatgactctgaccggctgcttcaccgcatcggggagcctgcatgtcaggctcggattatcggctttgactgtgcctgctccgacaagaatgctttgatgcgatttcctgtattgctgggcatcaagccttgccgcctctgatgtaatccatttgctgtcaccggtttcagtcgctgttttcccgtcaaggcttgcggccgctttcaaggtgacatacggaagtccggtccgcatgaagtgaagaaacattttattcagctcttctgcctgttgcctgagaagccccgttttcacttcgatgcccgctgcttccagcattgtgatgccttttccggctacaagcggattgggatcttccacagcgataaacaccctttttatccctgatttcatgatcagttcggcacatggcggtgtttttccgtaatggctgcaaggctcaagcgtcacatacaaatcagcgccttttgcatggctgcctgccatattgatcgcgtgcacctcagcatgggcctctccgtattgcaagtgggcgcccattccgacgatctgtccgtttttgacgacgacggcgccgacaagaggattcggctgtgtctgtccttcaccgcgtctggcaagctctattgccgtattcatataatattcttccatcgttatccctcccttcttccacgcaatttggcgtcaaaaaagccccgaatgtttacacagttcggggctttaccagttttaatccataggaaataagactatacagtatgattattttttgcatagcttctctcatccttctcccatccagactttcactgtcggcttcagcttttcactgaatccaccgtatacagatgcatacgggtcacgggctgtaaagcgcaggagcgccttattaccgccggtcgggattttcacccagccccgaaggatacaatcaatatttttttgtccttatccgctattataacatcctttacgggaggcgcaatgaatttgcacctaattattcagaaaaaataaaaagcgccttttttccaaaaaggcgccttcatttattcgtttactttaacgaccttcaataagccgtcaatccggttcgatttgctgaaatacgctttaatcttatctccttttttcacatcggagagatcctgtttcagcttgtcgccgttaaaaatgatttttgtgccgtttgctgccgtaccgtggtattcatttccttctattttcgtaattttatatgttttcactgtatattcttctttttcctgagacagggtttgtccgatcgcagtaggcacgtctttcagttcaatatcgtttatgaccataaaaccgcccgccaataacagcagcagtacaagtaaaatggctgcttttgttttaattctttccatttttctacctccagcccgtatcaatctattcattactatgtcatattcctttttttcatgaatagaaaaccgttcttccctgcgtgagttattcatataacgattcataaagggaagatgtttcatgtatctgtaaaactttctatctattaaatagatatacgaatttatgttctgtttttgtgggtggaaagataaatttatataaaaaaagcagttttctctaaagaaaactgctcgtacggtttatttcgtcttgcgaatttcattaaacgggaagaagacgaattttgatgttcccgctatttgttttttcgtaaaaagaccgaggccgttgcggctgtccatagagtttctgcggttatcacccatgacgaaatatttgtcgtccggcactttcaccgggccgaagtcatccgtcagcgtgtcatagccgtcctgcttcgcttttttcttgtttgccgctaaatacggttcggacacttttttgccgttgatgtacagctgatcgtttttcatttgcaccgtgtcgccgggaagtccgataatccgtttgacatagtgctcgttttctccgttcaaaacgacgatctggccgcgtttgaagtcgcttatgtatttgaccgtcatattgacaaagattctctcacggtcatgcagagtcggttccattgattccccgtcaacgacataaggagcaaataaaaagttgcggatgagcactgccagaacgacagcgatgataatggctttcgcccaatcaagtacggcgctttttttagaagttttttctttttctgatttcaagtgatttcctcccattagccatggttgtttttattttaccatgaatccctgcacagagggcaaataagccccgcacctcatccatttttttcatttcacaagccggatctgctgattttacggtatttcacgaagcttccgatccgccaaatgcacaaatacacaaaagcaagctccattgttaaaacggcaaattccgccgcgtcaatgtttttgaaatattgactgagcacgatacggatcgcaataatcgcgataatgacatatttaaagtttttattccgtttggagtagacaaagccgtcttcccggatttcatatgcggtttgcgacagcataatgacgccaaataccgcgcctaacagtccggcgatggcgagctcccaaacagcgggaagatgaaacggctttcccggaatatgcatgagctggctgatgctgaacgaaaaaatgacggcgataatcacaagcgggagaatgatgccgaagccgccgcctttaatcggcctgtttccctttttcattctgaaccaaaaaataagtgcaataataataatgacaaataaaacggttgccaattgaaccaacgtttttacctcttttcattgttgtaatcggtcttttacactataccagagtgaccgctatagttcatatatgtattttttcatgatttacacatgagaattttcatatacataaaaaaacccgcctgaaaaggcgggttttccgtcattaaccttctacacggacttctttcattttgtctccgttagacatgtttttcgcgtgctctaaaccgcttgtcacttttccgaatacagtgtgaacgccgtttaaatgcggctgcggctcatgtacgatgaagaattggcttgaacccgtgtctttaccggcatgcgccattgataaagaaccggcttcgtgcttatgcgggttgccttctgtttcacatttgatcgtttttccgcttccgcccatgcctgtcccagtcggatctccgccttggctgacaaagcccggaatcacgcggtggaaaataacgccgtcataaaagcccgtattcgccaggttttcaaagttagcgactgtattaggcgcttcattcgggtaaagttcaaattcgattctgctgccgttttccatttcgatgtaaccagttttcattctcattcctacttccatatgttttttgtcaaagccttcttccacatgaattttcaattgtaagccggctttctttttgatattcttttgaaggaagatgcgtctgctcttcttttcgcggcttattataccataccttcagccggaaaacgaatctcccagcttccaaagaaagaaaatgaaaccagaacagcttcacagccgtctatgtaacggaactgcttcacgcagggcctcacaaaccgcttcaaaacggcatttgtgaaaagaaggaggttaaccgctttgaaaaaaatgtggattggattgctggcggcggccgttgtattgtgcacaataccgaagatcagcctggccgatgccgcagtcggagatgtcatcgtcacactgggagcagatctgtcaaacgcagaccgtcaaaaagtgcttgacgaattaaatgttcctgacaacgcgacaaaagtgacggtcactaataaagaagaacatgaatatctgggaaaatatatatcgaatgcccaaatcggcacaagagccatttcttcatcatccatcacggtggaaaagaaagggtccgggcttgacgtccaaacccataacatcgattccattacggatgaaatgtacttaaacgccctgatgacagcaggcgtgaaagatgcgaaagtatacgtaacggcgccgtttgaagtatcaggaaccgctgcattaacagggatcattaaggcatatgaagtttcatcagacaaagcgatttcagaagatgtaaaacaagtcgccaaccaagagcttgtcacaacatcaaaactcggagataaaatcggagataaaaacgcctccgcgcttatcgcaaacattaaagacgatttcgcgaaaaacggtgtgcccgatacaaaagaaggaatcgagaaaaaagtcgatgatgcggcatcaaaccttaacattacactgactgacgctcaaaaagaccagcttgtttcattgtttaataaaatgaaaaatgccaagattgattggggccaagtcggcaatcagcttgataaggctaaagacaaaatcacaaagttcattcaatccgacgaaggcaaaagctttattcaaaaagtcattgatttcttcgcgtcgatttggaatgcgatcgtgtctgtatttacaggagacagcggatcaagttctaacagctaaaacaaaaaagagaccgggactgtatcgtcccggtctctttttttgtttattgtttgactcccgtcttaaacggcagatccagcttgacaatgtcttcataggtttctcttttaatgacaagatgcgcttcgccgtcttccacaaatacaaccgcgggacgcggaatgcggttatagttgttagccatgctgtatccgtatgcccccgtgcagaaaacggcgagcagatcgccttctttcacttccggaaggtctatatcccagatgagcatatctccgctttcacagcacttacccgcgatggataccgttgtgtcatggtgttctgagattctgtttgccgatacggcttcatatttcgcctgataaagcgcaggacggatattgtcgctcatgcctccgtcaacggctgcatatttacgggtgccgggcacttctttttgcgaaccgatggtataaagcgtcgttccggcgtctccgacgagcgaacgtcccggttcaatccaaatttccggaatgtcaaaagcgtacagttctgcgttttcttttaccgcttcaataattttttccacgtagacggcgggatgaagaggttcatcctcttctgtgtagcggatgccgaagcctcctcctaaattcagcacttcagagacaaagccgaatgattctctccattcattcagttttgcaaagattttttccgcggccaggacaaagcccgccgtatcaaaaatttgcgatccgatatggcagtgaacgccgagaagacggatatggtctgactgtaatacttgctcaatcgccttttctatttgcccgttatgcagatcaaaaccgaatttggaatcttcctgccccgtcgtaatataatcatgcgtgtgcgcctctacccccggggtgatccgcagaagcacatccatggcgcgccctgatttgcggcacagttccgcaagtaaggatatttcatgaaaattatcaacgacgatgcagccgatttgatgatcgagcgccatttgcaattcttccctgcttttgttattgccgtgaaaatgtatccggtcagccggaaaaccggccgaaaccgccgtaaacagctctccgccggacacaacgtccaatgaaagcccctcctgctcagcgagctgtatcattgcaacggaagaaaatgccttgctcgcgtatgcgacctgcgcttttaaatccgcgtcaatgaatgcctgtttaaagcttttagcgcgctcacgtattaaagccacgtcataaacataaagaggcgtgccgtaatgctccgctaaatacagcgcatccacacctccgatttccagatgacctagtttgttttgtctgcttgtgccatgtaagaacaatgctcattccctctttctgatccgcatatgggtgaaaaggacagcttttgttgagctgtccttatacaggtcccgtataagttaagacatacaatatcataatcttctgtcggtttcaatgcgattatgaaccgcttggctgtctttgacggtctttcgggtgaacaatgctcggtctgacttttgctcccggcactgtcgtccggacgagcacctgccacagcgccttgccgttaaatggtaaaaacggccataaatacggcgtatgaaatgagcggatactcgccattacgatcagcagcaatgtaaagccgataacaaagcctttcactttgaaaatggccacgagaatcattaagatgagacgcatcattttattggcgaggctgagttcatagctcggcgttgtgaatgatccgatggcggcgatcgatacgtacaaaatcacttcggctgaaaacagccccaccgctatggcgatttgtccgatcagcaccgccgcaatcagccccatggcggtcgataaagcggtcggcgtatggatcgcggccatcctgagaaactcaatgcccagatcggccaaaaagatttgcagaatgatcgggatatgcgtatttttatttaagccgataaaatccaatctttctggcagaagagacggttcgagaacaaacaggaaccaaatcggaagcaggacagttgaagcaataataccaaaaaacctgatccatcttaaaaatgtcccgacagaaggagcctgcctgtattcttccgcatgctgaacgtggtgaaaaatcgttgtgggcgttatgataacgctcggtgacgtatcgacgacgataatgacgtgaccttccaaaatatgattggcggccacatccgggcgttctgtgtatctgaccataggaaacgggttgtagccctgcttgacgataaattcttccaccgttttatcagccatcgtcagcccgtcaatgtcaatcgcattcacttcgttttcgacgatgctgacaagatcagggtccgcgatgtcctctatatacacaatggccagatcggtcttagagcgctcaccgactttcgtaattttgacgcggagcctttcgtctctgattcttcttctgatcaacgctgtattaatgacgatactttctataaaaccgtctcttgccccgcgcacgaccttttctgtatccggttcttcgggcgtgcgtccgggataattcctgacgtcgacgacgaaagcgaagccggcgtcttcaacgataacggcgacaagtccggaaagcacttgatccgttgcttcgtcgagtgttttcactttttggacctgctgattgacgagcctgttttcaacgacatcaatcgcttcatccgcgttctcgtcataattattgacatcgacgagctgctctattaaatgaatgataaacaaagtatcggttaacccgttgacaaagtaaatctggacttcccggcctaaaacttgaactttgcggacgccgacatcatagctcgtccccataccgacacggtctttaaaaaattgttcattttttctaggatcccggtatacttttatcatgttttccggtttttccggcatgatattcgctcctttctaaaatgaattcgacagccttcatcgtaatcggcgagcctttggatatatcatcttttcttcccatctttcctatgtcgccgatgcctacaatgaggggaacgtccagtttgtcaagacaatacaccgtgtctccgttcattctgtgctcgtccatttctctcattccgattttgtcgacgccaaactccgtcacttctccatcacggtcaatggagacatctactttcgtccattcagcctgatgggttttagaagcgaccgcaatcactcccagcacttcaatgtcttgatgtgaggcgacatatttcagcgccgtttcgcccggtccttcaccttgcaggcccgaatcgtcaaacatgacaaacaccgggtcattcggcgcggttttaatcagctgaacaagttccggaccgcttctggttgaaggattgccctttgattgggaaatacaccgtccgcctgttttttccgcggcatattcaatcgttttggcggcgtatacgtccccgtctgtcacaaggatgactttccgtttcgtcatcagacattatcctttcggtttaaaaataacagccacaagaaatgcgaataaaatcgctgaagatatgccggcggaggtaagttcaaaaatccccatgccgatcccgataaatccatgctcgtgagcttgatgcatggcgccgtgcaataagctgtgtccgaagctgacgatgggaaccgtcgcgcccgcgcctgcgaactcgataaatttgtcataaatgccgaacccgtctaataaggtgccgatgaccacaaaagttgtcatcacatgggcgggtgtcagtttaaaaatgtccagcagcagctgaccgataatacaaatgattcctccgcaaacaaaagccaacagatattccatttatgatgcacctcccgctcgctcaaataccacaccgtgggcgatggtcggaatggtttccttctgctgaatcattgtcggacttaaaagcgctcctgtcgcgacaacgagaaccctgttgagagaccccgcttttaattgattaaaaatatgtgtgtacgtaacaagcgcggagcaggcgcagccgcttccgcccgcaaatacctgctgatccggcgtatagatgagaagaccgcagtcatcgtgtttcgttccggcgggatagccttcttctttaagcaaatcttttaaaatcggcgagccgacgcctgaaaggtctcccgttaaaatcagatcgtaatcatccgccgtacggttcaagtccttcaggtgctgtttgattgtatctgcagcagcgggcgccatggcagagcccatatcaaacgggtctgtaatcccgaggtcgcttacttttcccactgtcgcgcttgtaatcttgatatcagaagggttttggctgatgatgaccgcccctccccccgtaaccgttgaagtggcggtatccggtttttgcccgccatactccgtcggattacggaattgccgttctgccgtcgcattatggctgctcgtggccgcaatcgccctgttcgcaaaaccgccgtcaatgagtgcggatgcgacggcaaccgtttccattgacgtcgagcaggcgccgaacagacagaggaacggaattttcagatgtcttgcgacgtaattggccgtcacattttgatttaaaagatcacctgcgagcaacaaatcaatatcgctttttttcaggttttgtttttgcaaagcggagttgatggcatcttccattaattgacgttccgccatttcccagtttttctgattgcaatgcatttcatcgtatgtcttatcaaacagcgagccgagcgggccgtctttttctttcggtccggctgccgtccccgccgcatttataaataacgggttttcaaacacccaggtttgctttccggtcaatttcattttttctcctcctatgaaaacagtttttcacaagcaaaccgtatcaggcctacgatataggccgccacgacgccgaatacaatgacgtttcccgccaatttaaacatgtttgtcgccactccgagcacaagcccttcacttctgtgttccagagccgcgcttgtcatactgtttgcaaatcccgtcaccggcacggctgaacccgctccggcaaattgaccgagtctgtcataaatgccgaatccggtcagcagggctgaaattaaaataagagtggcggacgtcgggttgcccgctgttttttcgttaaaattaaaaaagtggatgtaaaaatcttgaagagcctgcccgatcagacagatcaaaccgccgatcagaaaagctttgacacaattccagacatatggcggtttcggctgatagtctttcacttttgttttgtaattttcttttaagtttgtcacgtctgttcctccttatgaatgatggataaaatacagccaatgaaataaagagccggctattttgccgaacacaatggccatcagcaaaatgatgattttgctgccgaagccgatccgtttggcaagaatgggaagcacattcagcacttctgtaagcgcggcggccagcatgccgataaacatgccggccaaaagcccgaccggaacggctagccattcagataaaaaaaaatgattcatatttaaggtttcccagccgccaaacacagcccctgaaataacagccccttcgtaggcctgtacaaagcgcattgtttttgtcagctgcataaggcgggggacgattcccataacggttaaaaaagccacaaagcccgctcccacggtcagcccgccgccaagcccgacaaatataacgaaaagaatgctaacgatcatgcagatctttcatcgtttcttcattttcgtgcattgcgacataatgatcgagatcaagctgataattaaacatctcgacctccagcgggcttggctcttcattcaggcgttttttgaagatgtgattgaaaaagacgatcataccgagaccgaggccgatgctgtacggaatctgaagcagatacggatattcattccgtctgcccgttatgatttcatataaggcgatatgaacttctctcatactcacatcttcatgaaaattcataatggcgagacatgaaccgataaaaagcagcagccagacaccgacaaacaaaacggctgacagctgctttttctggtaatgaatttccactatcgtttcagcgccgccgacggtctgtacatcaagagcgggaaaagcggtatgaatggccttcagcacttttataatgtccagcactacgatatttttgtcttttttcgtgatctgatacagcggcagtgccgacagtttttttttcagcttttgctgtcccgcgatctgcgcggcgtcgccgactgtgatgatatctccggtatgagccttcacgcggtggcgaagtctgaggaatattcgtctttccatcttgcatcaccatctttcgggtggttatatatgtagtatgtggttcacttttgttctcattcatcagcggcaaaagaccataaattaccacttgtgcacaaataaaaaaagccggcccgtaaaaggtcagctttccgtatgatccatctgcactttaatctgctttaatatttttttctccagcctcgatacctggacttgtgaaatcccgagccgttcggctacttccgactgggtctggtctttgtaatacctcagatagacaatgagtttttcccgttcttccaaatcactgatcgcttccttgagggcgattttgtcaaaccacttctcttctgaatgatcggcgatctgatcgagcagggtgatcgggtctccgtcattttcatataccgtctcatgaatggatgaaggcgcccgcaccgcttcctgcgcaagcaccacatcctccgcatcaatttctaaatgatccgcgatttcctgaacggtcggcactcttccgtatgtttttgacagctcatctttcgcccggcggattttattgcccagttcttttaaagatcttgacactttgacggttccgtcatcacggatgaagcgctggatttctccgataatcatcggcacggcataagttgaaaaacggacatcataggacaaatcgaatttatcaacggattttaacaatccgatacagccgatctgaaacagatcgtccggctcatagcctctgtttaaaaacctttgcacgacagaccacacaagacgcatgtttttttctatgaggaggtctcttgcctgctggtcgccctcttggctctttttgattaattctttgacttcatggtccttgagctgcgcgtttttgctgtttttcttaacctccacatccataacaaatctccttaattacaaagcgctttgctttttgataggtgttttgttaagcgtatcgtcgtccccatctccggcgaggaatcaatcgtgacatcatccatgaagttttccataatggtaaagcccattccggagcgctcaagctcgggttttgtcgtaaagagcggctggcgcgcctcctccagatccgtgatcccgaggccttcatcccgtatggtcagatagacgacgtgatcctccagcgtgacggagatgtacacctttccgtcgcagttttcttcatagccgtggatgatcgcgtttgttaccgcttctgatacgacggttttgatttccgtcagctcgtccatcgtcgggtccagctgtgcgataaaagaagcaaccgttacacgcgcaaacgattcattctgactgagggctgaaaattcaagatgcatctcgtttttcatgatgccacccccagcgttaaaagcgctttttgttctgattgttcgaacctgataattttaaacaggcccgacatgtcaaacagacgtctcaccgcaggcgaaatcgcgcacacgaccatttctccgccgagctgtttaatttgtttataacgtcctaaaatcacgccgaggcccgagctgtccatgaaggaaagatcttcaaggttcagcacgatgtgacggatgccgtcagcctccagcgattcagtcaccttttgttttaatgattctgccgtatggtggtcaagttcacctgttaatcgaatacaaagcacggattctttgacatgaaagtcaattccaaggctcatgctcattcctccttgatatgatcggataatgagtgtttcgattttcgggaaagcaattccttcactatgacaaaactagtgcccattcgccacgattatttaaattttgtccaatctcccatcgtccgcttcagaaaagtgagaaaacccgctttttccatgtcgtcttttgccgtgacggggctttcaacgagcacttttccgtcttttttcagaacgaggctgccaagcacctctccttttttaaccggagccgttacattgctgttgattttcacttcttttttaactttgtccatattctccccctttttggctaaaagggaaatcggttcagacgtggtcagcttgatcagtttctgcttaccttttttgactttgaccgatccgacgatttgattccgtttatacaatggatgtgttttgaactggctgaaggcataatcaagcatttttgtcacttgggcatttctttctttcggagtgctggctccgaaaacgactgcgatgaccctcatattgccttttttagcggtggcagttaaacaatacttcgcttcgcctgtaaagccggttttcacaccgtctacacccggataaaatttgatcagccggtttgtattgacgagccagaactttttgtctgtattttctcttaaataatcctcatacgttcccgtaaattgagtgattttgtcatacttcaataattccttcgccatttttgccatgtcgtaagcagagctgtaatggcctttttcaggcaggcctgtcgggtttttgaaggaggtatctttcaatcccaattcttttgcttttttgttcatccggctgacgaaatcctcttccgaaccggcgatatattctgccatcgcgacagatgcgtcatttccggaagcgatcgcaattcctttgagcatttcttttaccgtcatttcctctccgggttcaaggaaaatctgcgagccgcccatggacgcggcatgttcactcgtcctgactttatcgctcatcttaatgtttcctttgtcaagcgcttccatgattaaaagcatggtcatgatttttgtcatgcttgccggcgccaggcgctcccggctgttcttattgtaaagaatgcttcccgtatcgcgttcaatcagcacggcgcttttggcttcatgagcgagctccgatgtatgttttccgtccggctttgcaaaagcggacggtgccgatgcggttaataaaatgccaatcaacaaagtggatataagacgtttcatctccaaagccctccatttcataatcctttttattttttccaagcccggtggttttatacgcctcatctggaaaatgtttcgttttgagggcacaaaaaaacagctgctcccgaagaaacagctgcctgatgtttatttatttttgagatcgtgcgactacggcttttacaagcttcaaaaagccgccttttactttttccgtcatttccatcacttcatcatgggataacggctggtcaagaataccggccgcagcgttggaaatgcatgagatgccgagaactcgcataccggcatggtttgcgacgataacttccggcacagtcgacatgccgacagcgtcagatcccatcgttcttaaaaaccgaacttctgccggcgtttcgtaagatggtcccgtaacagctgtatacacacctttttgaaccggaatgccaagctcatccgccgttttttcagccaagtttgacagctctttgtcataggcttctgacatgtccgggaatctgactccgaattcagcttcgttcggtccgattaacgggttggtgcccgtaaagttgatatggtcggtaataatcatcaaatcaccggcgcggaattcagtgttgataccgccggctgcgttcgtcacgatgagagattcaacgccgagcgccttcatcacgcggacgggaaacgttacctgatccattgagtagccttcatagtaatgaaagcggccctgcatcgcgataacctgtacaccttcaagcgtacccatcacaagctggccggcatggccttctaccgttgagaccggaaaatcaggaatcgtttcatatgtaagcttaacagctccttcaatttcatctgccaatactccgagccctgaccctaaaatcagaccgatcttcggtgtttctttcacgtgttctttaataaatgcagcagcacgttcgatcttttgtttcaaaaaaagtccccctactgtaatcttgataaaaagctttttccgtattccggcttttctgttttgaaattatccgcaatggttgcgccgatatcggcaaatgtatccgcaagcggcagttgttcagtgtgcttatgctttttgctgtagacaagaagcggcacatactcccgcgtgtggtctgtcccgtgatggacagggtcgttgccgtgatccgccgtaatgatgagcaggtcgtcttctttcattttttcaaacacttccggaagcctcgcgtcgaattcctcaagcgcttttccgtacccttccggatcacggcggtgtccgtacagcgcatcaaaatcaacgaggttggcaaagctcagacccgtaaaatcttcgccgatcgtttcaatgactttgtccatgccgtccatattagatactgtgcggcgtgacgaggtaatgccttctccatcataaatatcagaaattttgccgatggaaatgacgtcaaatccgctgtccttcattccgttcattaccgtgcggccgaacggtttgagggcataatcatggcggttcggcgtacgcgtgaagctgcccggttctccgacgaacggtcttgcgataatccggccgaccatgtatttcggatcaagcgtcagttctctggccgtctcacagatgctgtacagctcgtcaagcggaacgacatcttcgtgagccgcaatctgcaaaacggaatctgctgatgtataaacgatcagcgcacccgtttccatatgttctttaccgagctcgtccagaatcgccgttcctgaagccggcttatttccgatgattttccgtcccgaacgctgctcaagctcctgaagaagctcatccggaaatccttccgggaacactttaaacggtttttcaatataaaggcccataatctcccagtggcctgtcatcgtatctttcccgtttgacgcctcctgcattttaccgtagtacgcaagagggtgctccgttttttccactcccttaatgtctccgatcagtccgagaccgagctgagccatatggggcatatgtaaaccgttcatgtgctctgcgatatgtccgagcgtatttgcgcctatatcattaaaatcggccgcgtccggcgcttcaccgattccgacagaatccattacgatcaaaaatacacgtttatatttgtattcagacatcataaaagcctccttttcttccatctgtccattgtagcttacagaggtcagacaactcaagtataaaccgtttacattcttattgacaatgcccattcaaataataagaaccttctctgtattccgccaatccgacagaaaaaagccgcagcccctctggcagcggctcctaagcgcgcggatgatactgcttgtacacgtccttcagccttgttttcgacacatgcgtgtaaatttgcgtcgtggaaatatcggcatgtccgagcatctcctgtacggcgcgcaggtccgccccgttttcaagcaggtgcgttgcaaaagagtgccggagcgtgtgcggtgtcagttcttttttaatgcccgcctcaagtgcgatttttttcaggtttttccagaatccctgccggctgatctggcggccgtgatgattcagaaaaagtgcttcggtcacgtttttctttaataatttccctctggctttttcaatgtacgcttcgatcgcatgggaggcggcttcaccgatgggcacaatccgctctttccgcccttttccgaagcagcggacaaatcccatcgtcaaatggacatcagataatttcagctcgatcatctcgctgaccctgatacccgttacatacagcagttcaagcatggctttatccctgagaccgaacggactgtcaagcttaggcgtgtccaataaccgctctacttcttgcagcgccagcacttttggaagcgcccgctctgttttttgtgtttcaatatgtaccgaaggatctttatccgcggctttttcccttaacagaaactgatgaaaagaccggatcgacgccaaatgtctggcagacgtcttaccggattttccggagtcctttaaatgctttaaatattgaataatatgaagacgggtcacatcattccatgaagtgatctgaagggtttcagttaagaagagagaataacttttcagatcacgctcataggacatcatcgtattttgggacagccctctttcaaccctcacataatggatgaaatccttaatttgatccttcactcttgatctactccccgttttggtaaaaaaagatcaatcggccgaaccagccgtctttctcctcatgttccgttttggccactttgacggcggagccttccggtttatcgtaccgatgatagttttcatactctgaattcacccatatcatagcataatagaacagtgcggtaaaacctgtgaacagaataaacactttgatcgtatccgcggctgtttttatgaatctgcccatctttcgatcgatcctttctttggcggctgttagtacaccttatgccaatttcaaaggcttttatacataaaaacagcaaaaaaccctttcctgacagaaaaggttcataggcttttattctgtttcatcctcgcggcagcggtggcagattccgtgaaaagtcaatctatgatctttaattttaaatttccaatcacgttcaatcacttcttcaacgtcttcaagcagatcttcttcaatttcatcgacggctccgcactccatacacaccaagtgatgatgaaaatgggctgcgccttctttgcgaaggtcgtagcgggatacgccgtccccgaagttaattttatcaacgacttttaattctgttaataattctaatgtacggtatactgtagcgagaccaatttcaggagatttctcttttacgaggaggtatacatcttctgcgcttaaatggtcttcttcgttttcaagcagcactcttaccgttgcttcacgctgtggcgtaagcttgtagcttgacgagtgcagctgctttttaattcgatcaatacggttttccatgtctttccctcctacgccgcattccatgactcattataacaaaatacgcggagagttccaactataattattataaactgataaataaaagtattattttgtgataatcattctaaaatatgcgcgatgacagcttttccataaacaccggagacacgtaggcttccagcagcgaagcgatgactgagaagaacacgataagaatcagcacgaaggcgtagcgtccgaaccattggatcggcgcgtcatgaaggctgcgtttgacaaacagctgccggatcagtttcagcgaaaaagcgatggagcatgtccccatgataaggtatgccggaatgagaacgatgttttgcggcagcaccgaaatgaatgacaggaaaaatccgttcatccccatttgattcactaaaaatccgaccgtgaagccgacgacgattcctttcaaaaacaccataatgaaaataaccggaagaccgataacggaaatgccgaggatccacatcagacccaaatattttacatcatgaaagacggcctgccaaaacatttctgaagagcccgcatgttttccgtcagacagctgtccgaaaaacttgcttaaatagtaatacaaatcttctttctgcgtgatggtcatgctgttgacaatgattgcgccgaaaatgacgcccattaaaaacaaaacgaacacaaatatataaagtgacagatgatcctttacatggcgaaaaaacagttctttgtacgattgttttctcataccgctttcctcccgctaatctattgacttgatttagtagattgtatgaaagaaaagagaaaacatgacagagaatcatagaaaggcgcgagattccggcataaaaaaagaacccccgtcatcactccggtgatcacaggggttcctttttttatgttttattctttccagcctgtcttttttcgtttttgtcactctttcatgcgtgctgaaggacggcgcctccccccttgacaagactgcgtcacgcattccgtttcttctgagatgctcccgcatttttttcgctttgctcttcgccatgtgccgatcgctccttttccttttctctatcataacaaaaaaatccaagtgcgttcatgaatacggcttatgtttcgtccggtaagcgcgcagagacgttttggcagatgaaaagctcccgatcgcggcgtatccgtaaaagaatcccataaaaatccccgcatacacgtgttcgtggtgaccgaaaacgatagacacaacatttccgacaacaagggcaatcgtaggaacgaatatgccaggaacccggcagaacactttgatcagctgtgtgacgcataagacgatcggcacgccgatcacagcatcccaaatatttgtatggatcagcggaaaataatccacattgacacctctttactccgtcttttgctttctgttagcctgccaaagaattccgcttcctattcatataaaaaaacagcaccggacacatatccggtgctgcaagcattatttattttcccgccgcggcccgttctacggctgctgatacggcccgatgcacgtccgcgtccaaaggctgaggcacgagatcaccgtgtttcgtgcaagaggcgatggcttctgcggccgccacaagcatttcatggtcaattttcttgcttttagcgttcagcgcgccgcggaaaatacccgggaagccgagaacattattgactgaacggccgtcggctgcataggcggctccggcttgtaatgcctcttccggttcaatttccggtttcgggttagataaggccagaataacttgtccctttctgacatcttcttttttaattagacccggaactccggtagtgctgatcacgatgtcacacgtgtccattaaatccttgatgcttccgagcggctgacctccgtattgagcgaggcggttcattgcgtcttccgacttgtccgttccgcagaccgctttgaccccgtatgccataaacatgcggcagatggcgacgcctgccgcgccgagaccgatctgtccgaccttcgcttcttttaaatcaaggccggcgcttttacaagcggaaatggcggcagcgagagtgacgactgccgtgccgtgctggtcatcgtgcataaccggaatgtccaattcttccttcaggcggtcctcaatgtcaaagcagtgaggcgaaccgatatcttcaagcagaattccgctgaaccccggagaaatatgttttaccgtgcgaatgatttcttccggatcggaagtatcgagcaaaatcggaattccgctgatgcctgccagctggtcaaaaagcgctgctttcccttccattacgggcattccggcgacagagccgatattgccgagaccgagaatcgcagtaccgtcggtgacaatggcgacagaattgctgattgtcgtatagatggacgctttttcaggctccttttcgatcagtctgcacacatcagcgacgcccggtgtataaacacggccaagctcagccaatgttcggatcggcattttgctcttcatctgaattttcccgccttcatgggcagagagcacttcatctgagactgtgtgaagccggatgccttcaccgagagcttcaatggcttgaatgatttcctgcagctgctcctcattttcggcctgcaccgtaatgttgcgcatcgtgtagttcgggccgacttttacggtttcaacttccccgatatctccgcccatcactccgatggcggttgccacttttccgagatttccgggaacagtcggcgtttcaatcattaaagtccgaatcatatgctttgtaatcatgaaatgaacctcctaacccaatttttgagattgcatggatttttctttcgtataccaaatgaattttccagtgtatccgtacaatattgccagtccgatagacacgaaactgagccacatgaacggcagataagaaaatgtggatactccgagaatgccggccatataaattccgttgtcagaccacggcaccatccctgaagtaagcgtaccgcccacctctgcgttccgggataaaattcttctgtcaagtttcagtttatcataactgttctccatgatttttggcgtcagaatcaatgacacatacatcgcacagccgaaaatgtttcctaaaagagcgacgatcaacgtcgaaagcgttacatttcccggtgtggtcagttttttctcaaaagttgagacaatcacttttaatacgccgagcttttcaagaattcctccaaaaccgagaccgaacaggataacgaccaacgtatccagcataccggtgatacccccgcggtttaacaggccattcagaaattcgacgtccgttttaatggaaaaaccattataagcagtcgcgatggcactggcaaaattcattccttgaaacacagaggcccagattgcgccaagcaaagctccgatgacgatgacgggcatagacggctttttcaaaatcagaaggacaacgacgataacagccggaatgagcatccatatatgaatatcaaacgttttctgcaatgaagattttaagaattcaactttatcaagatcaatattttttccgccgtatataaatcccgttacggtaaaaagaatggccgtaataatataggacggaattgacagatacatcatcgctctgacgtgtgacagcacatccaccttagaaagcgtggaggcaagcaccgtactgtcagacagcggtgaaagcttgtccccgaagtaagcgccggacaaaacggctccagctacgatcggaagcggtatgcccattccctctccgatggccatcattgcgattcccgccgttcccaccgttccccaagacgttccggtcgcaacagacataatggaacaaataaccagtgtagcaagcaggaaaacatgaggattaataaactctaaaccataataaattaaagtcggcacaaccccgccggcaatccatgttccgataagcgcaccgaccgaaacaagaatcaaaaccgcttcaagaccgttcgatatcccggtgacaatagaggactgcaagtctttatatgaatagcccagcctgactccgagaataatagcaataaaccaggatataaacagagcaagctggatcggcaggtctaaaaacaccgtaaatgataaaacaagcgctaaaaacccgaataataagatgataatttccaataaatttggcaatctgacctctttcacaagaaaatccccctagaagaaaaaagctaaaacgctttcatcaaataatataacaaattatactatactgcctcatccctttgtatggcaaccgcctattcaccaaaaaacgtgaaaaggcggctgttgttgcttaaaaatttatttttccaaaagatcttttccagcgatccccggttttgtcatttcatatggattcaaaatgatatccaattcttcttctgtcaatacatcattttgaaggcagagatcccttacagattgccccgtcatgattgcttcacgggcaattcgcgcagccgcctcatacccaaggtgcggattgaccgctgtaatgacgccgacgcttttttccacgtattgcttcaggcgtttttcgttggcttcaattcccgccagacaatgatcggtaaatgagcggaaaccgttgttcataatgctgatggattgcagcaggttaaatacgagtaccggctccattacgttaagctccagctggcccgcttctgaagcgaggcagatcgtattgtcattcccgataacctggaaggcgatttggttgataagctctgccattacagggttgactttccccggcataatggatgatcccggctgacgggcgggcagggaaatttccgcaagtcccgcgcgcgggcctgaagccattaagcgcagatcgttggcgattttagacatgttcatcatgcatactttcaacgcagctgaaacttccgtatacgcatcggtgttttgtgtggcatcaaccaaatggcctgcgccgacaagcggcagtccgctgatgtcagcaaggtgcttcacaacctgttctatgtagcgcggatcagcgttaagtcccgtacctacggccgttgctcccatgtttacttcatagagatgctggcgggattgtttaattcgttttatatcacgctcaagcacgcggctgtatgcttcaaattcctgtccgagacggatcggcacagcgtcctgaaggtgtgtgcgtcccattttaatgacggaatcaaattgtttcgctttatctttaaagacactcagcatatgcgccatcgtatcaagaagcttatcaagaagttttaaggtagaaatatgaatcgctgtcgggaacacgtcgttcgtcgattgtgacatattgacgtgtgtgttcgggctgaggtgaatgtattcaccttttttatggcccatgatttcaagcgctctgttgccgattacttcgttggcattcatgttcatggacgttccggctccgccttggatcggatcgacgatgaattggtcatgccattttccttcaagaatttcgtctgcggcctggacaatcgcgtttccgattccttcatacagccgttttacatccatattggctagcgccgccgcttttttgacgatggcgagcgcattaatcatttcttcatggatgcggtagccggtaatcggaaagttttcttttgcgcgcagcgtttggatcccgtaatacacatcagcttcaatttgtttttctccaaggaaatctttttcctgacgatattctttttgcgcgtttgtcatgctaaaaccctactttctctttgtcttggtcatatttttacagtactacgtcgtctgcgatcggtgtctccataatacttttaacttcagccaaattgtgagactggccgagtgcccacattaatttcggcacgatggcttctgtgttcatatttctggagcggataatgagatcttgattgactcttcgtccgacttcatagacgctcatgtcctctccttcttcaaggcattgggtcgtaatgacaacgacaatgccgctttcaatcatttcattgactttggcgagaatgtctctaccttcaaacggtacgccgccgctgccgtagctttcaatgacgattcctttgtacatgccttttaacgcgtcaaacatttccggtttaagtcccggatggagcttgaggagacacacgtccgtgcaaagtgaagtattcaccgtaaaggcatcgtcttccggcaagtgcacgtgtttattgtattcaattccgttttcggtaataaacgcgatatacggatagttaatgctctcaaatgcatcatagcttttcgttcttaatttaatggcgcgggtgccttgaatgactctgccgtcaaatacgacatatacgccgcccacaccttcacatgcgaagcggatcgcgtccgtgatattttttttggcatcggttttttgaaatgtaatcgggatttgcgaacccgtaatgacgatcggtttatcagcatgctgaagcatataagacaatgccgctgatgtataagccattgtgtctgtaccgtgtgtaatgacgaacccgtcgtaagcgtcatatttttctttgacagcatcagctatttggacccaatattcaggctgcatatttgtgctgtcgatgttcattaacgaatgggtttccatcgtgtaatcgttatcaagttttgatacgtaggttaacaattcatctgctttcactccgggtgcaagcccgttttctccttcgactgaggcgattgttcctccggttgttaacagcaataattttttcataccctgcacctcttcatcatttctcaagatgtgttaagcattcgcttttcgcatacttttaatcaaattatagacagacaaatgaaattaatcaagtgattattattcaattcgcgtacacttttacatatcgatatgatataatttgctcaagtgaaaaggagcggtttttaatatgaatttagatcgtttaactgaactgagaaaaaagaaaaattggtctcttcaatatacggctgaccggctcggcatcgccaagagcacgtacgccgggtatgaatcaggctaccggcgtccgtcattcgaggcgctgggaacgcttgccgatctgtttgacacgacgtgcgacgatttactggggcgcactgaaaaaaaggcggagccgtttacccagaccatcgaattaacaaaagccgcacaaggccgcggcacactgaccgttgacgggcagccgcttaatcaggatgaaatcatcgaattaattgcgtttgtccgaacgaaaaagaaggtacaggaggagctccgctgaaaaattgctttacggctttatccggccgtacgttcccccgcccccggcctcaagggcgagctgtccggtgcgcgctttatgaatgacggccgctattttaggctgtacgacacgcgccaagtcctcttcttttgcccgatgaagaatcgccatctccgtcccgaaagcccgcttcagtttttctaatgttttcggcccgactccgggaatgaactgcagcgggatttgatgaatatacggaggccgcggcacgcggcttttttccgatccgctcagttcctcgagccgttcactgaccccttttgtcattgtttttcccccgcactccggacatgcggaagctcctttttcaaccgggctgccgcagcggtcgcaagccgtccggtaatacttccctagcttcggattcagtccgtaattcgccgtgatttttcttccgtccttcccttttaaagccagcgaaaattccgtgaaattcgcttccttaagaagcatttcattatattctctgccgattttccctaaggaatgcgcatcagaatttgttaaaaatgtatacgggtcaagttctgttaaccgcgaagccatatcggtgtcgcagcttaatccgagttccgccgcatcaatgagcgccgggtcgaatacttctcttaaagaagatctgaccccttttccgtacaggcttttatgcggggtgaacatatgggcgggaataaacagcccgcccaattcctttgttttcttttggagattcaaacctgtttcataaatgcgctgtgaactgagatggatgtttgtaagcctttttgcgagccactcggaaaacatcttcatttcggcaagagccggcataaagacgagaacgtgaatcggcccgaggcatgtatgatcatagatttcaagctcacttcccaacagaagcgtggtattccgataccggatgccgccttctttcagttcacggtatctgccttcttcaattccgcgctcgatttcttcaatgacttccggggaatggcagtcgatgatgcctaaaagttcaattcccttcccctcgcttgcttcttctaatatccggtgcagcgtcaatgttttggctccagtgattttgaccggttttcccgtatgggtgcgcccgatatgaatatgcagatccgcataaatggttttcatcatttttccttcagcgcttctttcagctggagatactgaatcgcgtacgccgttttagcgtcatacacccggcgctcttcggtcagtttcacggcctcatcaagcgtgacctgcatcacttcgacaaattcgtcctcatccagctcgcgcttttcttctagcggcgaaagcccttcagcaagaaagaggtgcacgatttcatcagcaaatccgggtgatgtataaaaagcggtaattttcgtcaaggtttccgccgtatatcccgtttcttcctccagctctcttaaagcggtatgctcgggctcttcccccttttcaagcttgccggccgggatttcaacgatagtccgttccagcggctttctgaactggttcaccaaaatgatttttccttcttcggtcaccgcaagcacggccaccgcccccggatgcttgacgatttcccgcttgcttgtttttccgttcggaagctctacatcttctaagtaaaggtctatgactttcccgtcatacagcttttttttcgctagtgttttttcttctaaatgttccatcatttcatctcccgttctgtctctctattatgcctcatatattttatcatacatgcatacgagggaggtgcttttcgattgaaggtataccggaaggataacagcatcgtattggtcggaaaggcttgggaagtgcgggctaaactgaaagagtacgggcggacattccgctatgtcggagattggatcaccgggccttaacagttgaaaacttcgcgcctttatattacggtcaataaaagaccataaaaaggagcgaaacaatgagaaaacgcacgctaggacgttctgatttagaaataagcgaaattgggctcggctgcatgtcgctgggcacggataaagctaaagcgctgtctattttggatgaagcgattgagcttggaatcaattatttagacactgccgatctttatgatttcggcagaaatgaggaaattgtcggagaggccgtcaaaaaccgcaggcacgatatcattttagccacgaaagccgggaaccgctggaatgatgagaaagacggctggcattgggacgcttccaaaggatacataaaagaagcggtcaaaaacagcctgcgccggctgaaaacggactatatcgacctttatcagctgcatggcggcacgatggaggataacatcgacgaaacgatcgaagcattcgaggacttaaaacaggaaggtgtcatccggtattacggcatttcctcgattcgtccgaatgtcattaaagaatatgtgaaaaaatcaaatatcaccagcattatgatgcagtacagcctgctggaccggcgtcccgaggagtggctgcctcttttagaggagaacggaatcagcatagtcgccagaggaccggtcgctaaagggcttcttacgaaaaaaccgcttgatcaagcggccgcaagcataaaagagaacggctatttaacatattcttttgaagaactggcagaaaccaagaaagcgattaacgctgccgcccctgatctgagcatgacggagctttctcttcaatacttgctttcacagccggccgtcgcttctgtcataacgggagccagctcacttgagcagctgagagaaaactgctcggcagcagaggcccggcgtttaagcagccaggaaatcaaagccctgcaatgtcatacaaaacgggacgtatacgaagcccatcgttcttaaacaataaaaccggcaccttttcagatgccggttttatttatatttgtgccaatcgagactgctttcattcagcagctcttcaaagcttttatttttttctatttcttttcgctttctgatttgttcggcctttttctgtgcctgttttttctcgtcttcttccttcagctcacttttcatttgcaaaagcttggccttcagatcttcctccagatcgtcttttaagctgtgtttttctttaggcagctgctttttcatcattacgcccccgtatctgaatatgctgaagcaagtgtaccacggagcgccggaggccggcaactgtccttcttttgttcagctgcctgaaaacccgggaaaggattttctatatttctgtcatttaaaggagggttcctgcgtgaaaaaatggctggcggtgttcggttcggcttgtgcagtctttttagctgccggatttgctcttacgaatctgattatgtttattaagaaaaaaacggatgaagatatcatgaaaagagaaacggcggacggacatgatctatttgattcctttcagaccatggaaaaagaagaggccgtcatcttgtcacgccacgggtatgagatcaaaggcttttacattgccccgtatgatacggcaaacaccatgattatttgtcacggcgttaccatgaattcgttcaactcattgaaatacatggatttgtttttagatttaggctggaatgtgcttatgtatgaccaccgccggcacggtaaaagcggcggcagaacgacgagctacggctattttgaaaaagatgatttggaagaagccgtgaattgggtgagaaacaaaaccggagacggcggtcaaatcggcatccacggcgaatcgatgggggcggtgacggccttattatatgcgggcgggcatcagaacggcgacggcgctgatttttatattgcggactgccctttcgcaagctttcacgatcagctcgcctacagactgaagcgggaattccggctgcctccgtggccgattctgcctttggctgatttctttttgcggatgagagagggataccgtatccgtgatgtatcgcctttgtcggtgatcagccgcatccggcagcccgtgctgtttattcacagtaaggaggatgattatatacctccttcttcttccgaattgctgcaccgcagaaaacgcggcccgaagatgctgtatcttgccgaatcgggcgggcatgccatgtcgtacaccaaaaatccggaaagctaccgtaaagccgttcaaacctttttagataccatgacgcaaacgtaaaaaagcgaaagaacgtatgctcgttctttcgctttcccgtcataaaacgtcggtaatcccgtccatattttctccgatccagtcaatggcgaggtcgattgtcgtaaattcctgcgctttgaaggtcatctcatcctgaagcaaccagacatccttctgaacggattcagcgcctccaatggaccagtgcagcagactgtacgggtggttgttgttcaggaaggatacccacgtcttatgctgtgccgtctgtttaatggctttcagcttttgattcactttccgtttctccctgctttactaatatgctcattctcgggctcagcatctctgccgggctttttaagacgagcgttttcgccttttcattgtaatcgattgtcatttcctcgtcaaaaaacactttttgagaggtctggatgtaaagcggaagtccgttggtttcaatgcgttcgcattgccccgttaattcgtccgtcagccagatggtcggcacgccgctgacagcgcatccgcagccttctgcgtcatagcggagctgcgcttttttctgcgggttggcgtccatcgcctgctggaatgtatgtttcgccgcatccgtcacatgtatttgcatagatgatcctccgtttttcattttcgccaattgtagcataccgcgccgctgtatgcattgtttctgcttttttacagcagaccgctctcccagtccttcgcctcttgttcagccgccttgatccagtcatttttcccttcaatatactttcccatatcgtacgggtatgtctcggcgagctgctgtttcagctccatgtattgagccgctttttcaggtcttgcggtgaggtaatcccggaacagcagatgacgctttacgtccgcatgtcctgtttcgtatatgtggacgtggtgtgtgcgcttgttgccgcctttttgaaaaaaacgccttccctttatcccgttctccccttttgcctcatagccgagtgcttccagctgcggacggtatcggtcagcatccaaaatatctttgacctccgccagtatatcaatgaccggttttgcggccatccccgggatggaggtgcttccgatatggctgacagaatggagtgcgggtccgaagattcggatcaaaaccgccttctctctctcaaacatctctttccattccggcttgtacggaatgacttccgctttcctcttcggataaaaatgaaaaaacgagagggtcagcccttccggcgtctcaatctgtccggcttccgtgaacccggtttttaaatagagagagactgccggaacgttttgtttagcggtagccacctctattttttgagcgtcccggttctcgtctatcacaaattgaagaagcgcccgtccgattcctttccgaaagccggacgggtgcaccgtcagccggcatatgacaagttcatatccctttttttcatacgaaatgacgcctatgagctgatcttttgccttgaaaccggcaaacgtctcccgtgaccgctgtatgtcacgcggtgtctcatgcagagcgggaatgccgaaaaagccgatcaactcggcttctttttgataagagcagcgctgaaccgctgcaatttcccgcgccgtctgttcttgtgtatgctgtaaaaatgtaatcaatcttccactccttttggtgcaaaccgctatgactccgttttcgttatgcggatcgcgtacgcactttttcctttttgttttgccgtccggtggccggtatggtctttccgcggtttcatcgcatccatgaacgctttcttcgcctaaaagccccgctgtcagtatgctcagattctccctttattgatgaaaaaatgaccgcataataaggcggtttgggcgtgtcagctaaaaaacccatattcggcctcctctatatgtatttcacaaacagaatccggtcttggcccgggccgtcataattcgcaaaaacagggattccgtttacggttttggttcctttttcaggttcaaagcctaactttgtatgataagcaattgacactttattaacaggcgccgtcacgcaattgacttttgtgcagcccctttttttcaccgtctccataaatcggtcgtagagctgttttccaatttgcatttttctgaaatccgggtgcacaccggaaaaatgaatgtaggccgtctcagggtctgactgtgactgaaacccaattaaaaaaccggtcattccctccggcccgtatgtaataaagcttgtgtcctgaaaatgttcaaaaaacaagcgcggcagtttttctttcatttgcctgccgccccaccattcattcaaaacagacgtaaccatttcatagtcttcagaggtgattgttcgaatatccattttcgattgactctccttttcgtccggcaaaatgaatgtcagctcttctcattggaatataaaaaattatatgtgggttatttgcaattgtaaatgatttctttttatgcgaacgaatcagccgtctcccaatcggggaatgatttaccagtataaacgcggtcattgttcgggtacaatgaaaaacagaacaaacgttcccggaggttttttttatggctgatattcttcttgttgatatgcaatcgttttatgcgtctgtagaaaaagcggaagcgcctcatcttaaaaaccggcccgtcatcgtttcgggagatcccgaaagacgcagcggggtcgtgcttgcggcttgtccgctcgccaaacgatacggcgtaaaaaacgccgaacggctgtgggaagcgcaggccaaatgccccgacgccgttatcgtccgtccgcggatgcagcggtatattgatgtatccgtcatgattaccgaactgtttgagcggtataccgaccttgtagaaccctactccatcgatgagcagtttctcgacgtgaccggaagcaggcggctgttcggtgatccttttacaatcgccgaaagcattcaacaagcgattatgcgtgaattcggtatttatgcccgtgtcggcatcgggccgaataaagcgctcgcgaaaatggcttgcgaccattttgccaaaaaaaacgcatccggcatccacaggctggatatgtcaaatatcaggcaggatctgtggcctctgccggtcggaaaactattcggcatcggaaaacggatggagcatcatttaagacggatgggcatcagcacaatcggcgggcttgccgggcatcctgccgaactgctgaaaaaacggtggggcattaacggcgaattgcttcagcggacggcccgcggcatcgatccctctccagtcaccgtaaacacgcacagccggcaaaaagcgatcggccataacatgacgctccccagggactactgccgctttgaggatatcaaagtcgttttgctggagttaagcgaagaagtggcccgccgcgcccgtttcaaacagtacatcggccatacggtttcggtcagcatcagaggcgcagattttgattttccttcaggttttcacagacagagaaagctcgtctctccgaccaatttcggaatggatatttttaaagcggcggtcaagctcttcaaagagcattggaacggtgagcccgtccgcagcgccggcgtcgccctttcccagctggagccctgtgattatgttcagctgagcctgtttgattccctggaaaaaaagatcagcctcggcaaagtattggatgatattcatgagcggtacggccccgcgtcgctgctccatgccgcttcgctgacagaggccggccaagcctttcaccgggccgaaaaaatcggcgggcactacaaataattgaggtgatatacatgaatccgaacaaattaacccccgggtataatgtcatgtgggagtcaagccggatgatgctgcccgaacatcgggagcagctgcttgcaaaaaaacgaaaagaacgggaattccggcctccggaactgagcgaagagcaaatgaacgacatgaaccgcaccattacggcgtcgattgaagaagacagggccatttcggtcacctacgcttcagcacacggcccccgccggttttggggatgggtaaaacaagtgatgcacgacgaaaagcgtttaaaaatcataaacgatgaagatgcattatcgctgccgtttcatcttattctctcagctgaattggaataaaaagcccatcccgtcctgacagaaaatatgatagaagagtgggaggatcatatgatatttagtagaatagatgaatgataagaataggagaatatatgatggatcaatttatagaaaaaatgctgggacaggccctccgccagtatggacggaatgtgtcgacagatccgctgagcccctatgaaaaacagcgtttaaaaaaagctttagaagaaagaaggaacgaagaacccgatgaggatctccatgcccatgtagaagatattatctacgattacgtcaccaaccagggccagttctcctgacactgacgtttatgcaccgggcgataagggaaacggtcgagagtaaacccttaaagattgcgtggtgcaggagatgccagtcgggccttatttcaagatcggatatgccgttcttttgttattcctcattatttatctcggaacattaatagactttttgttccagcctgttgtgattacggctaaaaccttgtttccgcccattgtattatcgggggtcctttactatttgtgccgcccgatcgtcagagtgctgcatgagaaagtaaagctgcccgaaggcatcgcgattttagcgatttatgcgggaacagccggcctttttgtcctcttcctttatacggcgggccctgccgttcaaaaacagtttgcagccttcacagatcatatccctgagctttccgcaaaagctgaaaattggatcagacaccttcaggacagcaaatggttttcccggattcagcatgaggattcctttaaaaaagcagcggacaaagccgcaaattattcaggttcaatcgctgattctctcagcagcctggccggtgcggctgccaatgccgccatcaccgccgccatcattccgtttgcgctgtattacatgttaaaggaaggaaataaagcgccccggcggctgctgcggcttcttccggaaaaacatcagaaagaaggaaaacaaatccttcaggacatggatgaggctctcagttcatacatacaaggacagctgctcgtcagtttttgtgtcggtgttctcgttacgaccggctatttcataatcgggctcgattatccgctcgtcctgggtgcgttcgccatggtgacaaacctgattccgtttatcgggccttggatcggcacatttccgggagtcattgtcggattgttcgattcaccgacgcgagcggtgctggtggttatagtcgtcgtcattgtccagcagcttgaaagccagctgatttccccgcaaattatgggccggaagcttgacattcacccgctgaccatcatttttcttctgcttgccgccggtaaattctcgggtattgccgggatgctgctggccattcccggctatgcggttgcaaaggtgatcataagccatatgcagaaactgttcattctcagaaaaaaacaaggctagagagaaacgattcacccctcatgccttcacatcggttaaaataaaaaaaaggcgggctgaagaatcccgccccacacggaggtcaaaagatgaacatcggtgatgtcatttttcaattcgtttcatttattgcagccgcgattttcctgtttgccgtgatatacgtattcagaagcatgaagcagcgccgccagcaattggacaggatcgaaaagaaactcgatgcgctgcgcgaagaaaaaaaccgcaaataagggggtcgcgggatttgtgtcacacccgtcttaccagcacctcttcaactttatggccgtcaccttttctcaaaatcaaatctgatctgaattttgtcggcagaatattttcatacagattcggacggttgacgctctcccaaatggaggcggccatggcatccgcttctgcatcagacaaatccttaaatttatgaaaataagaagccgggtcctgaaaagcggtttctcttaaaaggcggaagcgctccaaataccacgtgaaaatccggctttcttccgcatccacataaatcgaaaaatcaaagaaatccgatacaaaaatccgcggatcttccctgtcgtcctctaaagtcggcgactgcaggacattgattccttcgataatgacgatatccgcaccttcgacaacttcgacggcgccctcttccctgtcataagtaagatgggaatataggggcgcctccactctctctttccctgattttatatcattcagaaactcaagcagcgcttttacgtcataactttccgggaatccctttctggacagaaggttcttcctttttaattccgccgtcggatacaagaaaccgtcggttgtcaccagactcaccttcggcctgtccggcagacgggaaagaagcttttgcaaaattctcgccgtcgtgcttttgccgacggcgacgctgcccgcgatcccgataataaacgggattttcgctgaatgcggatgcttcagaaacacgttgacatgctgattccgtcttgcggcagacgtgacatgaaggtggagcaggcgcacaagcggaatgtaaatcgtttctacttcttcaaccgataggtagtcgttcagcccctctacggccttggcttcttcctctgaaacggcaatggaaagatggccgccgaatccggaccacgactcgcggctgtgctgcgtgtacaatgtatgtaagttcaattctttacttttcacaattcacaccaatctctctgtatggctttccggttaaaaaacaaacgcttacaaagattgtaacggaaaaccgcttcactgtctgcccatttttttcgcaaacgaggaaccgatgcggctgtactcttccatttcctcgtccggaaccatgctcccgccggtgctccacacaagatgcacggcattttccatctcaagcccccgctcttttatataacggtttcccgcttcggtctgaacgaacttgacagctccggccataccggcgagggcagaaggctcaaggctcttattctcggacgctcttaattgataaagcagcgaaaaaagcgtgctgtcatcagcggtataacagccgctgagtataggttccataagagggccggccagtccggacggccttcccaccgcaagtccgtcggcggccgtttgattatcaagaccgatatcctgcacgctgattccgtcatgcaaaccggaaaacagccctaacagcatacacggtgagtgcgtcggctccccgaaaaaaatatggacatgttcgccatagaccagctttagcgcaagcgcgacgccgcccgggcctcctccgaccccgcacggcagatagacgaaaagcggctcatcagcatcaggctttatgttcatttgatcgagctgctttttcacacgtccccccgcaacagcatagcccaaaaacagatcccgtgaatgctcatcatcaataaaataacaataagggtcctgctgcgcctgaatacgcccctctttaacagccagactgtagtctgcttcgtattcgatgacgcggacccctttttcccggagcagctcctttttccactgctttgcgtcaccggacatatgcacggtcacacaaaagccgagcttcgcgccgattatgccgatactaaggcctaaattgcctgtagagccgacggctatagaatatttcgagaaaaaatcagtaaaccgcttctcagtcaatatgctgtaatcatcatcttttgagagcattcccgctttttgcgcgaggtcttctgcatgcttcagcacttcgtaaatcccgccgcgggctttaatggaaccggaaatcggcagttcatcgtcgcatttcaaaagcagacgcccagggaaagcccggccggcgctgtgttccagacgtttcttcatttcattgatcaagacaagcggagattcaatgagacctcccgcctctttcgtctccgggaaagctgatgcgatataaggcgcaaaccggcgcagcctttcttccgcttcagcaatctcctcattccattcagcggcatgttttatgtgatcatcgtttttgtgcgggttgatccaaaagacttcacgcgcctccgccatttgcctgacgaaaggctcttccatcaatgccgtgcgtatatcccgatcagacatttgccttctcccccttgttactttttctttaatacccggccggccagtttttctgtaaacgaagggaaaagctgatacagcttcgtcccgaggctcatccatcccggaagattaatttcccgtttatccgtcaaaatcacggacgtaatgcgctctgccacacggtcggcatcaagcatccatctgccgacgcttttaacataactgccctctttatctgcaattgtaaagaagtctgttttgatcggtccgggattaaccgttgtcacagctacacccgtaccggccagctcgagccgcagggcattggaataccctaaaacggcatgtttcgtagcggaataaaggcttgatttcggcgtcgccagtttgccggcctgtgaagcgatattgataatatggccgcttttggcatgaagcatcaccggcagacaggctttcgtacaggcgattaatccgaatacattgacttcaaacattgacttcatatcatctaaagatgaatccgccgcagtttcaaaaataccgaaccccgcgttgttaattaatacgtcaacatgaccgattaaacgccttacgttttcagcttcttctgcatgccggacgtcaaacggaatgacatcacaccgtccgccccgcgcagtaatcgtatttttcacttcctgcaagcggtcttcccgcctggcggataaaaaaacatgggccccttctgccacgcaggaatatgcaagccgttctccaagtccgcctgatgctcctgtgatccaaatccgtttatccgttaatctgcccatttcattcactcctttacagctttaaacatcaaagtgtttcccgactgaaaagatacggccttcccttcagcggccagcacgtcaagatggccgatcgtttctgacattgttaaaaacaattcgttttcatacacagccggaaacagccgccggcatacttggaaagccgtcagcgtttcctctgacaacaggtgcagcacatagtccgcccggtttctctgtttttcaagccgcctgtcagcagctggccttacgtctgtcagcagatcgccgtgccccggatataaaaaagccgggttgatgtcatacagccgtttcattgatttcaaatagtcgagcatcggggatgagcgcacactccccttttccggagcctccagaatcggattggtggagctgttggacaaaagcagatcaccgctgaacatttcaccgtttttttcatggtaaagcgcaatatgagaagcggcatgacccggaatctcaagcaccgtccagccatcaagcccgtcaatttccccgccttctcccactgttttcgttagcggacggtttgctgaaaataagtatgacagcttaactgttttatgtatgtcttcaggtgtcagaggaacgcccatttcggtcataagggacagaaaaaaatcctcctgccgggcgatatacgactgatcctgagtcatgtacctgtcattcagcggatgcccgacaacttccgtgtcatcagaaaaaatgtgcagcaaacctgagtgatccgcgtgatgatgagtgagcaccacttgttctatatccgctgcggagaccccgtgttctttaagctgcattgagagtgattcagccgcttcctttgtattcgggccgcaatcaataagggttaatgcgtcatcttttactaaataaacgataacgtcgccgactgcaaacggagtcggcacacgtatcggaatgatctttctcgctgccatatttacgctccttcgttcttttcattcctgaatactcatattttagccttttctcatccctgtgtcattattgccgcatatcagaaaaaaagattgacatcccgctctgctgcatagcataatgaacaacaaactagaaaaaacggaacgcgatgacgaggaactagtatataaacaacggcagcagagagcaatgtccccggctgaaagacattgcggccctcttgtttacagaacctgccctcagagcggttaggaaaacctaaacgtatccctcgttacgggatttgagctgagcacggctgattcgtgctaatgtaaggtggtaccgcgaaaccttttcgtcctttttgacgggaaggttttttgtgttttggaaagaaggaggatttatatgaagaaaatcggttttatcggggccggatcaatggcggaagcaatggtgaacggactgctgcagagcggactgacagcccccggacatatatacatgacaaaccggtcaaatgacagccggcttgaagaacttcaagacacgtacggcgtgaaaccatgccgggataaagaagagtttttcagcaataccgacattatcgttctcgcctttaaaccgaaagatgcggcagaaagcattgagaacattcgcgaatacgttaaagatcagcttgtgatttctgtcatcgcagggctgacgattcacaccattcagcattatttcggcagaaagcttaccatcatccgggcgatgccgaatacatccgcggccattcaacaatcggcgaccggtttttctgcaagccctgaggcgagtgaggctgaaatccggatggcaaaagaactgctggaaacaatcggagaagcgacgctttttgaggaaaaacaccttgatgccgtcacagccattgccggaagcggccccgcctatgtgtaccgatatgtcgaagcaatggaaaaggccgcccttcaagtcggcctgccggaagagacggcaaaagagctgattttacaaaccatggctggagcgacggaaatgctcagaaaaagcagcaaacgacctgagcgcctgcgcaaggaaatcacaagcccgggcggcacaacggaagcaggccttcgcgctttaaacgagcgccgctttgaagaagccatcatacactgcattacagaaaccgcagcccggagcgcagaaattaaagaacaattcgcaggctccgttctgcaaaagacggatcaatcataaagcatggggctccccatgctttttttcgtccatttacaatttcggaagaccgctaacggcttacaggtttcttttcttgcacttatgaaagaggacgagcgagcaaaagcgaaaaataagactttcctgaaaaaaagtttgaagccgggctgcacccatgaggcaaaatcacatgtaggggaagaacacattaatcaaaagcggtgcattgacggttgagcttcaggacgaaggcgtgagccggcccccggtgatgcccatcagtttaccggggcgacgccgcagttatcttaattcctcgggtcacttattttgtgccggtccattatcctcatcctgcttaaacggcatatcaggcttcttcagacagaagcctgatggatcgcaacccattcttttatgcattgaatcagtttctgaacagaaggtgtctgcgtctcctttgcacgagctgtcaaaatgccgatctgcctgcagacataccggtcgagccgtttgatgagcacatcacaatcattcaccaaaagctgcggcaagaggctgatccccagattgttccgcaccattgcaataatcgcttcatcccctctgatttgataggcgatccgcggcgtgattttttcttccttcagcactttcagcacatcaaaatgtgtctccggataaggcacgatacatttgacggactccatgacatgtaaaggaaccgtttcacattgcgccaattcatgctgcggactcatcactactacaatcgggtcctcggccaacgggtaaaaatgccacttcccgctgtgggatgtcccgatcgccgcatcaacctgatcgtctttcagccattcttccagttcagttgaattcccttcaaacaaatgcaccttaatggaaggatacagcacattaaattctctcaaaattttcggcagccattttaccgccacactcgtaacagtgccgagccggatttctcctctttctaatccattaatattatcaacggtttcagacaatttttcatagtttttttgaatttccttcataatatgtaacactttcaagccatttgcggtgggcctcactccatgccgctgtctgatcagaagcggaaaaccgtactcttcttctaatttactgatcatttggctgatgttcggctgtgtgtaattcaatatggcagcggcttgggtcaggctgccgctttcaaccgttttaataaaggctaaatgtttctttaaatccaaccggcttcatctcccagatatcatttcttattatccagcgcattagttatatttagtttacttatacatcaatcaaaaataaaatggcaatgtctccataattatacttgataacaaacagaaggtgagcgttccagcatgagttttctcattcaatttttgatcggcggcaccgttatggtggctgctgcgtttttaagcaaatcgaaatacttatttttatcaggcgttatcacattgctgccgatcatgacgttgctgaatatacaattgcagctgaaaaatatgagcgccgacgatttcagagcagctcaaaaaaacggaatattcggtgcgttcggcgcggtgattttcatcagcagtatttttatcctgacaaactggttcaaaggaagccactccgtcatcggtgcgtttcttatctatatctgctatatgatcgcctgtaaatgcctgttatgaagatacagcccccctgtataaaaaaatgcccggtcagaacaataagaacattacgctcagttgtgagcagtttatatgactgaatgatcataagttgttataatcaatttctaaaacattccgggaggcgaaataaatggccagaaaattatttacaccatggaccgttaaagatgtaacgatcaaaaaccgtattgttatggcaccgatgtgtatgtattcctcacatgagaaggacggaaaactgcagccttttcatatggcgcactacatatcgcgcgcaatcggacaggtcggcctgataatcgttgaagcgacagctgtgaatccgcagggacgcatttccgatcaggatttgggcatttggagcgacgatcatatcgaaggttttgccaaactgacggaacaagtgaaagcgcaaggttcaaaaatcggcattcagctcgcgcacgcgggacgtaaagctgagcttgacggagacatttacgctccttcagccattccgttcgacgagcagtccaaaacaccggctgaaatgacgacagaacaaattaaagaaaccattcaggaattcaaacaggcggcggcacgcgcgaaagaagccggctttgacattatcgagcttcatgcggcacacggctacttaatgcacgaatttttgtcaccgctgtccaatcaccgcacagacgaatacggaggatcacatgaaaatcgctaccgcttcttaggcgagacgattgacgccgtcaaggaagtatgggacggcccgttatttgtccgtgtttctgcatctgattatacagacaaggggctggacattgccgatcacatcggttttgcgaagtggatgaaggaacagggagtcgacctgattgattgcagctcaggcgcactcgttcaagctgatattaacgtcttccccggctaccaagtgagcttcgcagagaaaatccgcgagcaggccgaaatcgcaacaggcgccgtcggtttgataacgacgggaacaatggcggaagaaattctgcagaacaaccgcgctgaccttatttttgtcgcgagagaacttctgcgcgatccgcactttgcaaggagtgcagcgaagcagctgaatacggaaataccgtcgccggttcaatacgacagagcatggtgacagaagagacagccggagatttttcgatccggctgtctctttttttattttttgagaaacgattgccgaagcttctccgtcttccctatagaaccaattagaggggatgactccaatgaaagcagcatggatggaaaggacatacttgattgacggatgtccgttttatactaaacaccgtaaaggtgccggcgaagtgacgatcgtctttgaagccggctacggcacttcttctgaaacatggacatcattactcgctgacatagatgaagaatttggggttttcacatatgacagggccggaatcggcaaaagcggacaaagcaaaaacaagagaacggcggatcacatggtacaggaattaaacgctctactgcttaaagccggcgtcaagcctccttaccttgtcgtctcgcattcatacggcacgattatcagcagactctgggcgagccgaaaccgccgggatattctcgggatggtattgcttgacccggtttctgaggatcaggagacaaaagtgcttccgcttcttcccgaggaaatgaaagccgcctatctgaaacagttcatactagaaggatcacatgcggaatttttgacgagtcttcggcagattaagcaccagcagcttcatttcagcgatatgccgctgttgattttatcatcgggagagcgggatgagcgcttaaagcacgcgcatgaacaatgggtaaacctgcacagaaatatgcttgatatctcgcatcaaagcggatggattcaggccaaaaacagttctcacgccattcatcacgatgaaccgcacatcgtccacctggccatttatgatgtttggtgtgcggcgcgccagcaaatgaatgcgcctgcctatcaggcggtaaactgataaaacaaaagccattgtgccgcggcacaatggcttttttattcgtgatctactttgtctcacggtgcaaagtatactttttcaaccggggtgaatactttttcagttctaaccggtccggattcgtccgtttgttcttcgtcgtaatataatttctgtcccctgtctctgtgcaagccaatgtcacattcacacgcatcattttcacctcacgatcaaatcgtaacaattacgttttattatagatcatcaaacaaaaatgtcaagcgcacattttttaagagcgctccacggcaacctccataaagtcaaaggcgaccttactgttttcaaataccgctttcgcctcatgttccagccgctctatcggcgcttcgccttgatacctggcgctgatatgagttaagatcagctgtttggcgcctgctttttttgctgtttgcgcggcctgttctgtcgtcgcgtgataataattatgcgcgagctttgcatcttccttggcaaacgtcgcttcatgaacaagtacatcggcattgcgcgccagttccgttacccgctctgatacacgggtatccccggaaaaagcgacgattcttccctttttcggcggctccaaaaaatcctcaccattaattattcttccatcgtcaagcgtgactgtttcgccttttttgattttctggtagacaggtccgggcggaatattcatttctttcagtctgccggcctgcaatgcaccgggaatatccttttcctgaatccgatagccgaacgcttctacaccgtgaatgacggatgctgcggtgacgatgaattggtcatcctcaaaaaccgttccctcttcaatttcatgtatggcaagaggataagtcaaatgtgtcgccgtcactttcaggcttgtttcgataaatgcttttatgccttttggcccgtaaatcgccagctcttcttcaccgccttgaaacgaccggcttcccaataaacccggaaggccgtaaacatggtcgccgtgaagatgtgtgatgaatatcttttcaattttcctcggtttaattgttgtatgtaaaatctgatgctgagtggcttccccgcaatcaaacagccatacggagcgcctttcttcaagaagcttcagcgcgacggacgttacgtttctcgtctttgccggcatgccggcccccgtccctaaaaatattaattccacaatgcttcctcctagatctttgtactactaaggatacaggatcaggctgaaaatgtgaattcgccaggggcgcccccggcatgattaatttttttccgcaaaccgcaaaaaacaggctgaaatgtttgctttcaatgaattttagatttaaaatgaaggaaatatgcggggttttaaaccatgcttcagataaagtgaggtactctaagtgaaaacaaacgacaaaccaaaagcagtaattgtaatatttggtgccacaggggatttggcaaaacgaaaactttacccatccattcatcgtttatataaaaatggtcaaattggtgaagagtttgcagttgtaggtgttggaagaagaccttggtcaaacgaggacctccgggaaaccgttaaaacgtctgtttcttcggctgggcaaaaagacacagacgatttcacgtctcatttttattaccatccgtttgatgtaacgaatccgggttcctatcaggagctgaatgtcctgcttgaccggcttgagcatacatatgaaatcccgaacaacagaatgttttacttggcgatggcccctgaatttttcggcactatcgcaaaatcgcttaaaaacgaaggtgtcacggcgacaaaaggctggtcccgtctcgtaattgaaaaaccgttcggccacgacctgccgagtgcgaaagagcttaacaaagaaatacgcgaagcgttcacagaagatcaaatttatcggatcgaccattacttaggcaagcaaatggttcaaaacatcgaagtcatccggtttgcgaatgcactgtttgagccgctgtggaataaccgctacatctcaaacatccagattacgtcaagtgaagatctcggcgttgaggaccgtgcgagatattatgagaaatcaggcgcactccgcgatatggttcagaatcatattttacaaatggtcgctcttttggcgatggaaccgccgattaaactgaacacggaagaaatccgcagcgaaaaagtgaaggtgctgagagcgctacgccctgtcgctcaaaacgaagtgaatgattacttcgtccgcggacaataccaagccggaacgatcgacggcacccctgtagcgagttatacggatgagcataacgtagcgccggattccaatacggaaacattcgtgtccggtaagctgttaatcgataacttccgctgggccggcgttccgttttatatccgcacaggaaaacggatgaaagaaaaatcaacgaaaattgtcgttcaatttaaagacattccgatgaacctttattacggcaatgaaacgaatgtaaatccgaacctgcttgtcatccacattcagccggatgaaggcatcactttatatctgaacgctaaaaaattaggcggagccgcacacgctcagccgattaagctggattactgcagcaactgcagtgatgaaatgaacacaccggaagcctatgaaaaattaattcacgactgtctgctcggcgatgcgacgaacttcgcccattgggatgaagtagcgctttcctggaatttcgtcgatgcgatttccgaaacatgggctgccgacaaaaccctttctccgaattatgaagccggatcaatgggaccgaaggcttcggatgacctcttggaaaaagacggccttcactggtggaatatataataatcaaaaaaccgcggcgccgttcattacggcccgcggtttttacatatcagaaaagcccccgcaataattgcgggggctttttcattacttcatccattcagtatggaaaatgccttctttatccgtgcgttcatacgtatgcgcgccgaagtagtcacgctgcgcttgaattaagtttgcaggaagcactgccgtacggtagctgtcgtaatacgcaagtgcgcttgagaacgaaggtaccggcacgccttgggctaccgcaagtgaaatgacttggcgaagagcgccttggtagctttctgcgatatttttgaaatagctgtcaagaagcaagttgtcaagctccggctcacggtcatacgcatctttgatcttttgcaggaacgccgcgcggatgatacagccgccgcggaagatcatagcgatctcaccgtatttcagatcccagttatattcttctgacgcggctttcatttgggcgaagccttgtgcgtaagaacagattttactcatgaagagcgcttttctgaccgcttcaatcagctcttctttattttcagtaaccggcttaacgtcaggtcctgacagaaggccgctcgctttcacacgctcatctttcattgcggaaatgaaacgcgcaaacacagattcagtgataatcggaagcggtacgcctaggtcaagagcgctttggcttgtccatttacccgttcctttttggcctgctttatcaaggatgacatcaacaagcggtttgcctgtttcttcatcttttttggtgaaaatgtcagccgtgatttcgatcagatagctgtcaagttcccctttgttccactcagcgaatacttcgtgaagctcttcggcagacagtccgagcacctgtttcagaatgaagtaagactcagagatcagctgcatgtcaccgtattcgataccgttgtgcaccattttcacatagtgtcccgctccgtccgggccgatgtatgtcgtacaagcttctccgtccactttagcagaaatggcttctaaaatcggtttcacaagttcatgcgcttccttttggccgcccggcataatagaaggccctttcagcgctccctcttcaccgcctgatacacccgttccgataaagtgaatgccgctttcggcaagctctttgttccggcgctgtgtatctttatagtatgtatttccgccgtcaatcaaaatatcgtctttttccagatgaggaagaagagattgaatcgtcgcatccgttgcagttcccgctttaaccattaatagaattttgcggggcgtttcaagagactggacaaactcctcaatgctgtatgtaccgacaacatttttgccttttgcctcttctaaaaactcttccgttttgctgcttgatctgttgtacacagacacagaaaatccccggctttcgatgttaagagccagatttttacccattaccgcaagaccgataactccgatttgttgttttgacatattctaacgtcccttcttcaaacgtttaaccattttaaaatttaaattaaaataaaatgatatttatactaaagaaattatcatagataaccccttttttcaagttattcagcttttcttttcatcctgaaaaaagtctctgttaaagctcgttccctttgttttgctttcttcttttttcataacggcgccttttctgatcaggtttcggccgtacttttcattcagctgattcatcatctgaaaaatcggctcgtcctttgcatcctccttgaacgaaaacagatcaagctgtttatacgcctgctgtttttcaaccagttccgttccggtgatgccgagaagccttactggattttggttccaatgtttgtcaaacagctccattgccgcttccatgatgtcttttttctgatcaaccggattgctgagggtcatgcttcttgtgaccgttttccaatccgcataacggatcatgatgaacagccggcaggccatgacctccttacgctggagccgttcgcttacagaaagcgcgagacggtcaaacacgccggttaattcgtcccagtcagccgaatcatgcgacagggtggatgagttgccgacgcttttaaattcataaatccgctcgggatcgacttctgcatggtggatgccgttcgctttatccttcagtctcgggccgtttataccgagcagcgtcttcagcgcatgctcatctccttttgccagatcaccgatcgttttgatgccgagcgtttttattttttccgcagttttcgttcctataccgtgcatttcttcaatcggaagaggccacaatacgtccggcagctctctttttcttaaaatggtgatgccgagcggttttttcatgtcggacgccattttggcgagaaatttattcggagcgatgccgatgcttgacggaagcaaaagctccttttgcagtcttgcctgaatgtctatggcggtctcatacgccctgtgtctgtgcggtgtgtctgtaatatccatgtatccttcatcaatagaaacgggctcgactaaatccgtatactccctcaggatgctgaacatttcttttgacgaactccggtagcggtcaaaattcggaggcacgacgatgagttccggacagaggcgttttgcccgccacaccggcatggtggtctttacgccccgcgctctcgcttcgtagctgcaggtgacgatgattcctttccgttccttcacgtttccggcaacggcgagaggttttccctttaaagacggatcatacgccatttctacggaggcatagaaactgttcatatcgatatgaaatataattcttccttttccggccactcccggcgcctcctttcctttcatagacaaacctcatatatatgtagtaaaataaaagctgaatggatgtgatgaaatgattcttgagtcaatgaatgactttttatttttagtcgattttttcacaattattcttcccgctctgaccgcgatcggcatcgcatttcttttgcgtgagtgccgcgcaggcgagcattggagaacgaaacgtatagatgaacatcaagcagtcgttcagctgaaccgaacagactttcttattattatatatcatcgcattacaacttggatacgtaaagtcatccgcatgaattcaccggcgaatgatgatgaagatgtcagcttcctccttttataacggcaagtgataataaaaaggaggagacatgaattgtctaaaacatatcaaaaatggattgctttcggattgttttttatcgtgctgttcacaggccgctcggcgtttgcggcgacatctcagactcagacgggaggactcggaaatatcgggtttttccacgattacctgatcgaaccgttttcggccctattaaaaggtgtggcgggcctgttccacggtgagtacggactgtcgattattctggtgacgattatcgtccggatcgttgtattgcctttgtttgtgaaccaatttaagaaacagcgggtgttccaggaaaaaatggctgtgatcaaaccgcaggtcgacagcattcaggctaaaatgaaaaaaacgaaagatgcggaaaaacaaaaagaactgcaaatggaaatgatgaagctttaccgtgagcataatctgaatccgatggcaatgggatgtcttccgatgctggtacaattcccgattctgatcggtttttattacgccatccgctcaacgccggaaatcgcttcacactcattcctgtggttcagcctagggcactctgatatgcttgtatccctgtgcgcgggggccatgtatttcttacaggcttatgtttcccaaaaactaaacgagaaatattcaccggccgctcaaaacccggccgcgatgcagtcagcaaaaatcatggtctttattttccctgtcatgatgactgttttttcacttaacgttccggctgcgcttccgctttactggtttacaagcggactgtttttgacagtgcaaaacgtacttttacagcagacgcatcataaaaagaaacaagctgcggctcaagcggagcccgtaaagtcataatactgaacctgccggataagttccggcaggtttttttcatgcgtttgcagacgcgaaaaaaaaaagcacccaattcattgggtgcttcgttttcagtttgccgctgtttcgataatggcaacgaccatttccgccgttttcacgagctcttcaatcggcattttttcatttttcgtgtggatttgttcatagcctactgacaggttgactgtcggaatgccgtggccggcaatgacgttcgcgtcacttccgccgccgcttgtctgaagctcgctcggccggccgatttttgccgccgcttttttcgcgacttccacaacctgatcgccgtcctgatatttgaaacccggatacatgaccgcgatgtcaacttctgcgcgtccacccatctcagctgcagcagattcgaaagcttctttcattttctgcacttgcgcttccattttttcagggactaatgaacgcgcttcagccagaatatcgacttggtcgcagacgatattggtttgtgtgccgccttcaaaacgcccgatattagccgttgtttcttcatcaatacggccgagcggcatttttgagatcgcttttgacgcgattgtaatagcggagatgcctttttccggttctactcctgcatgagccgttttcccgaaaatggttgccctcactttcgcttgtgtcggcgcggctacaatgatgttgccgactttcccgtctgaatcaagcgcaaaaccgtatttcgcggtaatatctgaacgatccattgcttttgccccgactaatcctgattcttctccggctgtgatgatgaattcaattgttccgtgctcgatgttttgttctttgagtactctgatggcttcaaacattgcggcaaggcccgtcttatcatcagcgccgagaatcgtcgtgccgtcggtttttacataaccgtcttccacaaccggcttaacgcctttgcccgggacaaccgtgtccatgtgcgatgtgaaataaatcgtatccgcatcttttgtgccctttaaagtacagattaaattgccggctccgtgacccgtcacttcttttgtatcgtcttcttttacgctcaatcctaaatcagtgaatttttgtttgagcactttgctgatttccgcttcatgctttgtttctgaatcaatttggacgagttccagaaattcttccagcaggcgtttttcgtttaccatttacagttccctccgtttaaagcggtatattaccgtgcttttttttcggtctttcctcttccttatgcgcaagcatgtcaaatgcctgaatcaattttttcctcgagtcttccggccggatgatatcatccaccattccgcaggccgccgctttatacggaccggcattttccttttcgtatatggcttttttttcgcgcttcgttttttccggatcatcagaagcctgtatgtctctgcggtataaaatcgacgacgcgccttcagctcccatcacggcaatttccgcattcggccaggcgaatacaagatctgccccgaggcctttcgaattcatggcgacataagcgcctccgtaagcttttctgatgatgagcgtcactttcggcacggccgcttcggcaaaagcatacagcaattttgctccgtgacggatgattcccgcgtgctcctgctgaaggcccggcagaaatcccggtacatcagcgatcgttaacagcggaatatgaaacgcgtcgcaaaaacggatgaatctcgacgctttgtcagcggcatctatcgtaaggctccccgccaaatgtttcggctggtttgcgataacaccgactgtgcgccgtccgatcttcagaaaaccgacagcaatgtttttggcaaaatacggctgaatgtcaaaaaacgttccgtcatccgccagttcttttatcacctgtaacatatcgtaaggtttcgaactgtccgcgggaacgagggtatttaataacggcctggcgtcttcctttttaacgggtgatgccgtctgtctgccgtgcggaagataagaaagcagcgttttcactgcggaaagagcctctttttccgttcgtgcggaatagtgggcatttccgctgatcacattatgtattccctcaccgcctaaactttccgcgtcaatctgttcacccgtaacctgttcaatgactttcgggcctgtaataaacatgtgcgacgtattttccgccataattacaaaatccgtcagagcgggtgaataaacagcaccgccggcacacggcccaaggatgacggaaatttgcggaatcactcccgagtaaaggacgttgcgcctaaagatatgaccgtatccatttaatgataccacaccctcttgaattctcgcaccacctgagtcgttcagcccgatgatcggggttttatttttcgcggccagatccatcaccgctgcgattttctccgcatgtgtctcgccgagcgtcccgccgagtacggtaaagtcatgagcaaacaaatacacgggccgtccgtcaattgtgccgtatccggtaatgacgccgtctcccggcgcattttgacacccgggcatgcggctttttgcaaacggctgaagctctgaaaaactgtctttgtccaataaataggcaattctttctcttgccgtcagcttgccttttttatgctgtttttcatttctttccgctccgccgccgtttgttaaaaaggaacgtttttcgtttaagtgtctgatatgctcactcatgctcatcttgagtttctcctttttcaattgtttcacaaagctcaatcaggaccccgttcgcctcttttggagagagaaatgcgattttcttcccgcccgctccgttctgcggttcatgatggatcaatgtcatgcggcatgattcaagctccttgatcgtttccttaatgtcgtcgcaccggaacgccagatgatgaagcccttcacctcttttctgtaaaaaagagctgacgggagacgcgtccgacagcggctcaatcagttcaagctttgtgcctcccgcttctaaaaaagcagctttcacattttgtccgtttaccagctcttctcccatataagtaagccccagcatccgttcgtaaaatccccttgctgcatcaatagagctgacggcaataccgacatgatcaagttttttcatagcgcggccacctgctttccgccataggatatggcttgttcatacaagcaaaacacgttaaaatgataaacagtaatcttaaggagtgaaacgatgtctcaaaaattcatgaaaagcgccgtcatcgtcattctaggcgtatttatactgtcaaccgtcttttcaagcattatgatgtatttgcgataaaaaagcaggcgcctcattgcacagggatctcctgcttttttatgagggctttccgctcttttgcaatgttctcaaatgagcggttttcttttgtaatcaacacttttgttccctcagggatgatccgaaaaatatggatgacatcccggtttttcatacggatgcagccgtttgatacaaaccctccgatcagctcttctctgtttgtcccgtgaatgccgtatatcctgccgtcggttcctctcgcgtcaaaaccgatccagcggacgccgagcggattttccggcgcacctccctctacatttttcttccgataatatggatttacggctttaaccgttaccgtaaattctccttcaggcgtcagatcatctgtctttcccgtcgccacctgataaatgccttctattcgattatccttcacaacggctagcgcatttgtggctttattgacgattatataagggtcacccggcaaaggattcgcgccaagcggccaaagcggggacagcagcagggcggctgacaataaaaaaaatcgcatgggctcccctccttttttcattagaatgaccaatgaaaggaggactcatgcgatgatccatgtgttttttacagcttgatgcctttgaaataacttttaatcacgagatattgctccatctcaccgagcaggtgaaacaaagccgcccgcgcttcaaactcctcgcgtgttgccgggagcggcatctcttcaaattctgttctcatatctgcaagtctttttaaaaatttatgagcggtattgccggggtgaatggcttcccttaaatcatggatgaaatgggcaatcatttttccctgctccaccgttattgaaatagaagtaatcttcggcagcagccgttcgatgatttcaaattgtttctgtctcatcttaaaatagtgataatagagattttcatggcgcaaaatatgattctgcacgtcccggtaggcaaggtttttcgcctcttgaatcatctgatgcgtctccggtatttcctttcccgtccaatcttgctcaccagttaacaaataccgttcgatttcagcgaagatgacggcaaaattgtcctcaatttttttccggtacgccgcaagtttcctatcgaggctcggcatatacagattcattaacagcgcgacaccgatacctacggtgatcagctggaactcattccagataaacgccatcgtaatgccgccggacatatatagatgaagaatgataactgagcttgtgacgatcccttcgtttattttcaagacgactgtagttggaataaacagcacaagcaatattccgatcacaaacggataatagccgatcagtccgaaaaagacatatgaaaagacgattgccaataaacaggcggcaaatcgggcccacgaggcctgaagcgaccgcttttgcgtaatttggatgcacaatatggtgatgattcctgcggatgcgaagttttgcagatgcaacagctgagctaaataaatggccagcgccgttccaagtgcggtctttagtgtgcggtaaccgattttaaacattgcttgctccattctgtttgtttctttctcaaaaaaaagaagaagagcacgcttcttcttttcttacagttatattttataatattttttctaaaaagtcctgtgctctttttgacttcggagaaagaaaaaattcttccggctgcccgtcttccactatcgtgccttcatccataaataatacgcggtctgcgacttctttggcaaatcccatttcgtgcgtgacgatgaccatcgtcatgcccgtttgagcgagctccttcataacctcaagaacttctttgaccatttccgggtcaagagctgaggtcggctcgtcaaacagcatgatgtcaggattcatggcaagggcacgcgcgatggcgacacgctgcttctgcccgcctgacaaacggttcggatagtcgttccgtttttcaagcagtccgactttttcaaggagagcgcacgccttttcctccgccgcctttttggactctttcttcacgctgaccggcgcatatatgatattttcaagcaccgttttatgcggaaacagatgaaaatgctgaaataccatcccgatattttcccgcactttcagtttattcgttttagcagcggtgatttctttttctttaatggcaatcgttccgccgctcggggtttccagcagatttaagcagcgcagaaacgttgatttgccggagccggaaggtccgatgacagcgacgacttccccttctgcgatctgtgttgaaatgtttttcagtacttcatgttttccgaatgattttgacaggttgtcgaccttaatcattggctttcagcttcctttctacgccttttccgatgaatgctaagatcaaaacgagcacgtaatagatgaaaccggccacaatgagaggttctaaatagttgtatgttgcggcaccggactggtaggcccgtctcataatatcgccgagaccgattacggtgacgatcgccgattctttcgtcaaggtgattaattcgttaataatggccggagaaatgtttttaaatgcctgcggcagaagcagatctttcatcatttttccgtacggcacaccgagagcgacggccgcttctttttgtcctttgtcaatcgcgttgattcccgctctgataatttcagagacgtaagctgctgaattaagtgataatgcggtgaccgccgcccaaaattggtcgatctgaaagccgagaagctccggcatcccgaaataaataatcatcagctgcagcacgagcggcgtgccgcggaatatcgaagtataaaaatccgcaatccatttcagcggactgatcgtgctgattttaaacaaactgagcacgatgcctaatacaaggccgatgaccgctgaaacgagcacaattttcaatgtgacggcaaggccttccaatataaaaggaatttggggtattgtcgctgagaaatccaaattcatacgtttgatctcctttacctgtattcaagataaaaagctcaacgaaaagttgagctttcttttatttctcgttggtgaaccatttcttcttcagtttttcgatttctccgtttttctccatttctttcagcgctttgttaaacttcgctgtcagatcactgtctttgcggaacgcaatcgcggaacccgattcgtctgatttcgcatctgctgatgcaaagccctgcagatcattatttgaactgaaatagccttgtgctacgatgtcttcgataatcgcggcatcaaaacgcccggatttaatctcttccgttaagtctgaaatgcggttgcggtcttcaagctggaaaccgtatttcgaagcaagtttcttgcctttttcttcttgaatggagccgagctgaacaccgacggttttgcctttcagatcatccagggatttaatgctgcttccctttttcgtaacgatcatattgttagcagtataataaataccggagaaatccacttgctttttccgttccggcgtaggtgtcattcctgataaaatcatatcaacctgcttagacttcagggctgtgatcaggctgttgaagtccatgtcctgcacctcaacgtcatagccggtctttttgcccagagcttttgccaaatcaacgtcaaacccgacgatctgatcgccgtctttatattcaaatggtttataatcagccgatgtacccataatcaatttgttctttccgccctctgagcctgaattgcctgatccgcaggcggacagcgcaaaggtgatacatgcggcaaccaataccaacagccatttcttcatgattattttcctccatatctgcttatctcttaaaattgaatatttattcgttaatctgtattttaaacactttttaatagttatgcaatactattttcgaaaaatatatttccttatctgcgtttattatagtcgttgattcccgaatgagtgacaactgaacgccggtgcataaataatttatatttatacaaacccaatataaaaaaaccccgcaagcgctcggctccggggttttcctttcacttatacttcttcacaatattcttcaaatgcttcctgcagttttgtgacgacggccataggctcatgtccttcaatttcatggcgttccaccattttcatgattttcccgtcttttaaaatcgcaaatgacggagaggacggcggatagccttcaaagtattctctcgctttggctgtcgcttctttgtcctgtccggcaaatactgtcacaagctgatcggggcgtttatcgtaatgcacggaatggtacgccgcaggtcttgcaattccgcctgcgcatccgcacacagagttgaccatgacaagtgtcgttccttttttcgaaagcgcttcgtccacttcctcagcggttttcagctccgtatacccggcggccgtgatttcctggcgggcttgacgcacgacatcattcataaataaattaaaatccatattcaactgggacctctcctttttgatcatctattcttatgatagcaaggaacctgccctatcggcaaatgacaccgctcatatccgaatgttttttgtcccttttatgttcctctatttaagtttatgaccttttaaaaacgggaaacttgttaaggagattgtctgaaataaaggagcagtcgtatgagccaacggaaagcagtattaatttataacggtaacgccggtcagaaacagattgataaaacgctcggcacggtcgtccccattttggcccagtcagctgatgagcttttgattaaaccgaccaaacatcaggatgatgcccgtcggttttgtgaaaatctcgacagctcggttgaccatttatatattttagggggagacggtacggtgcatcaatgcatcaacagcatcagcaagcttgatcacagacccgctgtcggcattttgccgggaggaacgtgcaatgatttctcacgggcgctcggcattccgcaaaaccttcaaaaggccgctgaagcgctcgcggctgggcataaacggatgattgacgtctgtaaatcggatgacggctattttctgaacttctggggcatcgggctgatcactgaagcctccagccatatcaatgaaacagaaaaagcatggctcggaaaaatcagctacttcacgagcgccttgcggacgatgacaagcgcgaacccttttcccgtcaaattgacgatcgacggcgaggtgaaagaagatgaagccgttatggtgcttgtcatgaacgggcattacatcgggacaaacagagttcccctgcctgatgcaaaccttcaggacggcttagccgatgtgttaatctgccgcaacacaagccttggagcattgcgggagctgatgacaatggaacagggtacatttgatgatttcaaaggggagctgtcctatattcaagcctccagaattgaaatcgaaaccggacgcgagatggacgccgatacggatggcgaggtatacggaaagacaccttgcacgatcgaagtgaaaaaacatcatctcactatgcttgttcccgaagattcagaatgaaactgaaaaaactccctttgccacccgggcaaaaggagttttttttaatagactgaagtattttcgtcaatgttttctaagatctctttgacgcgtccgaggaaacggccgcacacaagcccgtcgagcactctgtgatccaaagacaggcaaagattaaccatgtcacgcacggcaatcatcccgttattcatgacaaccggacgtttgacaattgattctacctgaagaatcgccgcctgcggatggttgataatgcccatagactgaaccgagccgaaagatcccgtgttattgacggtaaatgtgccgccctgcatatcatcggcggtaagttttccgtctctcacttttttcgcaaggtctgttatttctctggctatgcctttaatcgttttttcatcagcatgcttaataaccggaacaaaaagcgaatcttctgtggcaacggcaatggagatattaatgtctttcttttggacgattttgtctcccgcccacatgctgttcatctgcgggaattctttgagagcctgcgccgccgctttcacaaagaaagcaaaaaatgttaaattgaagccttctttctgtttaaacgagtcttttatgctgtttctgtatgccgtcatgtttgtgacgtcgacttccatcatcgtccaggcatgcggaatttctgttttgcttttatgcatattggctgcgatggcttttctgacgcctgtaaccggaatttcaatatcaccggctgacagagctggcgccggtgcttgtttttgctgctgtttcggctcttgcggggcttgaacggcagccgctttcggcgtttccgtcttctgctgcatgcccgaatcaatgatcttttgaatgtctttccgtgtaattcttccgcctgcacccgttccttcaacttgttcaagctgaatgccgtgttctcccgctaatctgagcacggccggcgaataacgcgctttatttgaccggtctttgcccgctccgtgtgaagggttatttgcaggtgtgctttgctcttcttcccgcttcggcgcttcttgggtttccgttttttctgtttcaattttgcagattatctcgccgaccgcaagagtctgcccttcttctcctacaagttctgtaatcgtgcccgtaaaagaagacggcacctccgcattcactttatctgtcatgacctcggcgatggggtcgtatttattcacatgatcaccgggggataccagccatttgctgatcgtcccttctgttacactctctccgagctgcggcatcgccatttgttcaatcgccatgtcaaaaacctccttacgtctttaaaactccgctaattctctcattgcggcttctgctttgtcaggattcatcatgaagtatttttccatcgtcggcgcataaggcatcgccggaacatcaggacctgcaagccgcttgatcggcgcgtctaaatcaaataagcagttctcagaaataatggcggcgacttcgctcataatgctgccttctttcgtatcttctgtgatcagcaaaacttttcccgttttagacgcggcttcaatgatggcttctttatctaacggatagaccgtacgcaagtctaatacgtgcgcggaaattccgtctttttcaagacgctcggcagcctgcagagcgaaatgaacgcataatccgtacgtaatgacagtaatgtcgctgccttcgcgttttacatcggccttaccgatcggaaggacataatcatcggcagggacttcgcctttaatcaggcggtatgcccgcttatgctcgaaaaacagcacggggtcatcatcacgaactgcagcttttaacagcccttttgcgtcataaggagttgaaggcatgacaattttaagtcccggctggttggcaaaaatggcctcaacagattgggagtgatacaatgcgccatgcacgccgcctccgtatggcgctctgatgaccatcggacagctccaatcattgtttgaacggtagcggatttttgccgcttctgaaatgatttgattgaccgcaggaagaatgaaatcggcaaattgcatctccgcgatcggacgcatgccgtacatcgcggcgccgataccgacaccggcaatcgctgattccgcaagcggcgtatccataacccgctcttctccgaactgctcataaagacctgccgtggctttaaacacgccgccttttctcccgacgtcttccccgagaacaaaaacgcgcggatctctttccatttcttctttcattgctgcattaatactgtcaatataagacattacagacataagtattcctccctacttcgcataaacgtgatcaagcgttgattcaggagatgcgtatggcgctttctccgcttcgtctgtcgcttcgtttacgatggccatgatgtcatccagcatggccttttcttcttcttcgccgagaagcccggcttcttgcaggtatgctttgtatatgagaagcggatcttgtttctttgcttcttctacttctttacgttctctgtagctgctgtcgtcgtcatcactggaatgcggcgtcaaacggtaggaaaccgtttctattaatgtagggccttcgcctttagacgcccgttcgcgcgcttctttcacagcctgataaacttccagcaggtcgtttccgtcaacagtgactcccggcatgccgtagcctaccgcccggtcggaaatattctcgcaggccacctgtctgtcatacgggacagagatggcatacttattgttttcacacatgaaaatgaccggcagtttatgcacggcggcaaagtttgccccttcgtgaaaatctccctggttggaagatccttctccaaaggtaacgaaagagacgatatcctttttatccatgcgtcccgcaagcgcgattccgaccgcgtgaggcacctgcgtcgtcacaggggatgagcccgttacgattctgtttttcttttgcccgaagtggcccggcatctgcctcccgcctgaattcgggtcagccgctttcgcaaaaccggacatcatcaaatcctttgcagtcataccgaatgcaagcactacccccatatctctgtagtacggaagcacatagtcggtatcacggtttaaagcataagccgcgcctacttgagccgcttcctgcccttgacatgaaataacgaacggaattttgcccgagcggtttaacagccacattctttcgtcgatttttctggctaacagcatggttctgtacatttcaacggcttccgcgtcagaaagccctaatgcttgatggcggtttgtagtcattcaaacccctccttctttccttttaaaaatgaatcgcgtttccgtctgcggctaacgcagcttctccaatcgcctctgaaagcgacggatgcgggtgtatggactgaccgatttcccacggcgtcgcatcgagcaccttggcaagccccgcttcagaaatcatatcggtgacgtgcggaccgatcatatgaacaccgagaatatcatctgtattccggtcggcgacgattttgacaaagccgtcgctttctccgtatacaagagcctttccgatcgccatgaacggaaacttcccgatcttaagttcatggccttttccggcggcttcttcttctgtcataccgacactcgccgcttccggatttgaataaatgcatttcggcacaagggcggcatcaagcggagccggattaagacccgccatatgctcaaccgcaatgataccttcacgggaggccacatgtgcaagctgcagcccgccgacgacatcaccgatcgcataaatatgcgattccttcgtctgtccggattcgtttacgaggatagaaccgttttccaaagcaatgtccgtattttcgagcccgattccttcaatattcggctggcggccgatggaaacaagcatttgttccgcgtgatacgtttcgctttctccattcttttcagcttcaattgaaacgccgtccgctttttccaatgtatccggaagcactttcgcacccgttacgatcttaattccttttttcgttaacagtttttccatttcgcttgaaatatcacggtcttcagtcggcaaaatgcggtccgcgtattcaattacagtgatattgacgccgaaatcattcagcatggatgcccattcaataccgatgacaccgccgccgacgattatcatggattgaggcagacgttcaagctgcagcgcttcatctgacgtcagaatataagtaccgtctgcttctaaacctggaagcattttcggccttgaaccggttgcgataattaattgtttcggtatcagcatgtcgttttcttcaccatttgcgtattcgacggaaatggtacccggaagaggtgagaagatggaagggccgagcatacgtccgtacccgttgaatacatcaatcttcccctttttcatcagatgggcgacacctccggccagccggtcaacgattccctgctttcgtttttgcacgctgtcaaaacggagagagacaccttccgtttcaatgccgaatgctgccgcttcctttgcggtccgatacacttctgcgcttcttaacagcgctttactcggaatacatcctttatgaaggcatgttcccccgagttgttctttttctacaacggccgtttttaagccaagctgggccgctctgatggcggcaacataaccgcccgtgccgccgcccagaatgaccacatcatactcagtcgccatttgttttcactccttcgccgatctgatattgtttcgcctgctcctcaccggctaaaacccgaagcgcgccttgcgcaagtgattgcagttcattttctcccggatacaccagtacatccgaaatccaatctatgtacgatctgatggcggaaacgaaatctttcccgtacgccaatccgcctgtcaggacgataatgtctacttttccttttaaaacggcgctagccgccccgatttctttcgctatctgataagccatggcgtcataaatgagccgcgcattttcatctccgtcctgaatgcgtttttccactttcaccgcgtccgttgttcccaggtagccggagagtccgcccgtgccgacaagttttttcatcatatcggcttttgaatacttgccggaaaaacacatctccaccagatcacccgccggaacggttcccgcacgttccggactgaatggcccttctccgtgaagcccattgttgacatcagtcacccgtccgcagtcatgaacgccgactgtgatgccgccgcccatatgagtgacgatcatcttcatctgttcataccgcttgccgagagacgccgccgccgtacgggcaacggctttttggtttaaagcgtggaaaatgcttttccgcttgatttcaggcattccagatactttagcaaggggtgtcatctcatccaccacgacaggatcgacgatatacgccgggatattaagtccgtcagctatttccctggcaataatcccgcccagattcgaagcatgctggccattgtacccgtttttcaaatcagtgatcatggcgtcattcacttcatatgtgccgccctcaatcggtctgagcaggccgcctctggcacaaacggcatcaaactttgaaatgttgatgccctgttcgtgcagagactcaagtatgcttatttttcgaaattcgtattggtcgataatgctgttaaatgttttcagctcttcttcggggtgccgcagcgtcttttcaaagatacagcgttcattgtgaaagacaccgattttcgttgatgttgagcctggattcagaatgagaatgcgtttttcctgttcgaacattttcatacctccagatcaaattcctatcgtctgcttaatacactttggccgttttgcagaaactggcttcttgaacggcgcatgcgctcaattcgctcttcagccagacggtcagccgctaagtaagtcggaatgccgtcacgcgcagaaatatcgagcacccgttcaatatttgcatagatgccttcaacctttttcaaagcccgctcagcattatagccgtaaagctcatcagctacattgatgacaccgccggcattgatgacataatccggcgcgtacacgattcccatttcatgaatggtatcaccatgacgtgtttctttcagctggttattggccgcccccgcaataactttcgccttcagctgtttaatcgtgtcatcgttaatgacggcaccgagggcacacggagcataaatatcgcacgcctgtgagtaaatgtcgtccggatcaacggcacgggccccgaagtcttcaacggcacgtttaacagattctttattgatatccgtcacgattaaagaagcaccttcttcgtgaagatggcggcaaagattgtaagccacatttcccacaccttgcacggcaattgtttttccttccagcgaatcagtgccaaacgccgctttagcagcagctttcatccctttgtagacaccgtatgccgtaaccggagatgggtttcctgatgaaccgaatgccggagaaatccctgttacatagtctgtttcatcatgaataatatccatatcttcaacggttgtgccgacgtcttccgccgtaatgtatcttccgtttaagccttgaatgtaccggccgaatgcgcggaacatttcttcattcttatctttgcgcgggtccccgataataacggttttcccgccgcctaagtttaaaccggcagccgcatttttataagtcatgccttttgcaagtcttaatgcatcttcaattgccgcttcttcactgtcatatgtccacattctcgttccgccgagtgcagggccgagcgttgtatcatgaatcgcgatgatcgcttttaagcctgactgttcatcttggcagaataccaattgttcgtaatcataagtttccatatatttaaaaatttccataggtacgttcctcctactgttcttgtgatgcgcaaatcgcaagcgcaattgaatacagtttattttctgcggtatccgctctgctcgttaatgcaatcggcgccttcgcacccgcgatgacggcagcaacatttgctttcgcaaaataaatcattgacttataaagcatatttccagcctctattgaaggaaccaagagaatatccgcctggcccgctacgcttccggaaatccctttttgcagtgctgcagcttgagatacggcattatccaaagcaagcggtccgtccgcgatacagcctgtaatctggcctctattgcacatttggacgatcgcagccgcgttcagcgtcgcctccattttcggattaaccgtttcaatagccgcaaggactgcggctttcggcatagggttccctactgaatgcgcgacatgaaccgcattttgcagaatatgccggagctcttcaagagacggggcgatgttcagcgctgaatcagtcacatacatcagccggtcatagtccggcacctcaaaaacggctacatgtgataacacacttttagaacgcagcccttcctggcggtttaaaaccgacttcagaagagttgagctcggcagattccctttcattaaaatatccgcctcttgttcgcgtactgcgcgcactgcttttgccgcagattcttcgggtgaatcggcgtggataatgtcagcattgaacttcggctcatttgccagaagctctttcagcttttcgctgtcacccgtcagtaaaaatcgtgccgacaagtgctctgccgccattttgacagcctggattacttctttatctgctgcgtgggccactgcaatggtttttgcgttttttgccgcggctttttcaactaagtctctcagcttcattttgtaccaccttccttgttcgaatccgcttttatcaatgcaagttccgtgccaaatgttcgggagggttattccggccttttttcaagaaaacatgcagctgtttgcgctttctctgcaatttattgcatgccgtcatttgcaaggccgtacttgtccattttgtagtacagattccgaatgctgacgccaagcgcttttgccgttttggttcggttgaatttatgcttttcaagcgttttttgaatgacgtgcgcttcaaatttttcaacggcctgagagagtttttctccttccacatccggaaaatcacttcgggcgccgcttttttcactcagctctgtttcaaaaacaggcagatgctgctgttctatccgctccatgtgcggctctaaaaatatcatcgcccggccgagaacattttcgagctctcggacgtttcccggccagctgtaggctgataaagcacgcagcgcgttcggcgcgagcccctttacgttgcggccgtaatcctgattgattttttcgatgagccgaatgctcagcgcttcaatatcctctttgcgctgccgaagcggcgggattgagatcggatagcggttaatccggtaatacaggtcttcccggaacgttccttccgccatggccttttcgatattgacgtttgtcgctgcgataattctgacattgacagaaatcgctttagcaccgccgactctggtaatttctttttcctgcagaaccctgagcagcttcgcctgggtgctttgggtcagctctccgatttcatctaagaaaatgctgccgttattcgcttcttcaaaaagcccttttttgcccccgcgcctcgcgcccgtaaacgcgccttcctcatagccgaaaagctcggattccagcagggattcagacagggccgcacaattaacccgaatgaacttattgtattttctgtcgctttcgttatggatggcgtgggcgaaaagttcttttccggtgccggattctccccgcagcagaatcgtcgccggcgttttcgccccgagcttcgcctgttcaagggcgaccagcatttgttcactcgtgccgataatgtcgtcaaacgtgtatttcgcttcaagcgtgcggatgatctgccgcgcccggttcaattcagcagtcagtgttttaatttctgacacatcgtgaatgactccgacgctgccttttaaaatgccgtccacaataaccggcgcaacattcacgatgacatcctttttattggggccgactttcattcttacgccccgtacaggccgccttgtccccaatactttcaggtgcatgctttctccttctgagatatcggtggaggcgggttttccgatgacttcgctttctgacagcccggtcatttttgtatacgctttgttgattaacattccgatgccgttttcatcaacgacggaaatggcttcgtctgacgattgaataatcgcttcaagcatggtgcggatttgttttaagttcgttacctcttctgccagctcaactgcgtccgtgatgtctttaaacacgcataacgcaccgagaagctttccgccttcatcaatgatcggcagtcttgtcgtgacaatctgcaggtgctttccgagaagctgcttctggttatattccggctctctcgtctccagaatccgcggcagttttgtgttcggcacgacatctttaatttggcggccgatgacatgctcccgtttttggccgaccattttttcagccatctgattaaataaaatgatcgtttcgttgacgtctataaaaatcatgccatcgtgggttgaattaaaaatccggtcatgcttatacgtctgtgacttcagcatttgaataagctgctgcttttcctccatcagctgaaacaccatgtacgccaatttccccggcatgacgatggtttgttcttttttctcatggagcagttcatccatgaccgctttgtcacctgttgtatggatgataatatctatatcttcggttatgtaaggtttccaatctgatgaggttgcaattccatatctccgggcttcttgcagcccttgcgcctccggatcttggtcaaccaccgcaataatccggatcaattttgttttcatcaaaatctgtaagagcgccgtgcctcctttaccagcacctataatcagcaccttctgcatcccgatacccctttgtatgaaaaaatttgcacacctgtattttccgttgcaataatttgcacaacccctatgttaccatgttttcatctcttgacaaaatattttttcgattggacaataaaggaaatcatatcgaaaaggggttttctgaatatgagccggcttgttgcgcttttgatcctggtcctccccggcgctgttgcggcgctcggcattaagctgatgagagatgcattattcgggcatacgtttgccccgtttccgtccctttttcttcagggagcggccggactggcgttttttttgttcggtctttatattctggccggatttattctgtaccgagatcggaaacgcaatcaagtcagcccgcggttcaggaaaaaaaagctgtaaaaaaaagcccttgcaaaaaagggcttttttcagtcatccggcagtatcgtttttgcaatggattgatcaagttcctcatagtcatggtaagcgatcgtttcatataattcttttctcgtctgcatatccgaaagcccctctttttgcgagccttcttcttttataaggcggaaaatacgctcaaaagccttggccgccgtcctgagagacgtgacagggtaaatgaccatctgacagcccatgccggagaattcttcagcgctgtaatacggcgtttttccgaattcagtcatatttgcgagaatcggcacactgatttgtttggaaaacgctctgaattcactttctgattggagcgcttccgggaaaatggcgtcagcacccgcttttatataagcggccgctcgttttaatgcgccctccagcccttcctgctgtctggcgtctgtcctcgcaacaacgagaagagtcggcgctgcctgcttgaccgcttggattttctgcgccatttcttcgatcggcacgagctgcttcccattcagatgcccgcattttttcggcaggcgctggtcctccatttggacggcggctgcgcgcgcttcatacatttctttcgccgtccgggcggcattcagcactcctccgaaacccgtatcaatatccacaaggacaggcaggtcagatgcacggaccaggtctttaacacgttcagccatttccgccgacgtgatgatgcctaaatcgggaagccctctgctcgccgtgtaagccgcgcctgacaaataaagagccgaaaaccccgttttcttggcgataagagcagccatcgcatcgtgagcgccggggatctgcaatagctccggcgctgtcatctgcgtacggaaccgctctgcaagctcctcttgagacgactgcctgctgacgatccacgtcatgtttgtcaccctcctactttatacgagaaataagtccataaattcaataacgctgagctgctgcatccgtccgctatgtttgcaggcttcttctattttatgctgctgcttcagtgaaaaatgagtgctgacgtttgctgaaaacttggcaagaatattcggaacggcttcttttctgcggaatcggtgcccgagcgggtattcacattcaatccgttccgtagctgtgccgtctgtaaaatgcacctgcacggcatttgagatggatcgcttatgcgggtctaagtaatcttttgagtacgctttatgttccgtcacctccattttgctccgcaatgtatcaattctcgggtcagaggccgtttcctcttcataatggtctgccgtaatatctccgaaaagcagcccgattgccgtaatgtactgcaggcaatgatcccggtcagccggattgtgaagcgggccttttttatcaataatccggatggctgactcatgcgtcaaaatcgtgattctgtcgatttccccgatgcggtctttcacctcaggatggagttggaccgcgcattccgcagctgtttgggcgtggaattcagccggataggatactttaaacaaaacattctccataacataggaaccaagcgggcgggcaagcttcatttcctgctgattaaataatacatcttgaaatccccatcccggtgcggtcagcgccgtcgggtatcccatttcacctttcagcgccatgagggccaaatacacgcctctgctcgtcgcatcaccggccgcccatgatttgcgcgatccggtgttcggcgcatgccggtacgttctgaggcttgaattgtcaatccaggcgtgtgatacggcgttgctgatttcctcttttgaaccgcccagcatttgcgtgcaaacagccgcagtcgccactttcacaaacagcacatggtccagtccgactctgtttaaactgttttccaaagcgagaataccttggatttcgtgcgctttgatcattgcgcgaagcacatcgcgcacggtaaacggttctttcccttcagacacccttactctggaaatatagtccgcacaggccaaaatgcctccgagattgtcagacggatgaccccattccgccgcaagccacgtatcattataatcgagccatctgttgatacatccgatattaaaagcggccgtgacggggtctaaaacaaaaggcgtgccggggactctgcttccgttcggcacggaggttcccggaacaatcgggccgagcagctttgtacattcgggatagctgagcgccagaattccgcagcctatcgtatcaagaagcacatgtcctgccgtagtgaaagcttctgaactgtcaatctcttgatggagcacataatcagaaatctcttcgatcacggcgtccattcggcgggtttctgtcatattttcatcttcctttctcatctgtttacagacgcgctccggtatagcggacacgcgggcggaaaagccggtttcggctgtgctgttcaatgacgtgcgcgcataggccgaccgtccgtgcgctgaagaatataggcgtgtacagcggaatcggaatgccgagcatgtaatagaccggcgctgcgtagtaatctaaattcgggtaaaggccttttttctcccgcatgacggtttcaccggcttcacacatgttataaagacggaaatcacccgaaagatcagacagctttttcaatgcttctttcatcatgagcgccctcgggtccatttttttcatgtagacgcggtgaccgaagcccatgattttttctttgtttgcgagtttttgagttaacaattgtataaacccgtctgtatctttcgcttcttcaagcatgtacataaccgcttcgttcgctccaccgtgaaggtttcccttcaatgaggcgacggctccggtcagagcgccgtatatatccgattgtgtcgaagcaatgacgcgggccgtaaacgttgagttcggcaattcatgctcactgtataaaagaagcgaccggtcgaatatttcttcttccaaggatgacggggtttttccggtaatcatatataaaaagtttgcgctgtacgataaggtcccgacaggcgctaaaggctccagcccgtttatgacacgatagctgttgacggtaagattcggcattttgcctatcagcccgcggacacggtgctgattcacagatgaggtgcggtcatcaatgtccttgtcaaagcctccaagcgcggacaaacccgtcctcagtccgtccatcgggtgagtatgttctggcagcagacggcagatgtgcaagatttcctcaggaaggtatccgccgcgccggacgtcctcttcaagcgccgccttctctttcgcatcaggaagtctgtcttccaataagaggtggacaatgtccatatagccggccgttttagaaagctcaatcagatcgtggcctttgatcaaaatactgccctgctgtgtatccagaaaagaaattcccgtttccaccgcaataacgccatctaaaccgggagaataagattccatgatttcgctccttttcgcacattttattgaagaagatacttagaaataatcagcctttgaatctcattggtgccttcatagatttgcgtgaccttcgcatcccgaaataaacgctccgcaggatactctttcatatagccgtagccgccgtgaatctgcacagcctcaaccgccgctttcatcgccgcatcagacgcgaactgctttgccattgatgcttcttttccgcacggaagcccgcgctgatacagatcagcagcatgatagaccaataacttggcagcttccgcattcgtcgccatgtcagaaagtttaaaagaaacagcctgattcgaggcgatgggcctgccgaactggctgcgggttttggagtactcgacagagcagccgagcgccgcttcgataatcccgagcgcctgagccgctatgccgatccgcccgacatcaaggtttttcatggcgattgaaaaaccctcgccctcttcgccgagcctgttctcaattggaatttccgcttggtcaaattgcaattcgacagtgctggaacctaacagtccgagctttttttctttttttccgatagaaaagccgggtgtgtttttttcaacgataaaagcggatatccccttcctccctttagccgggtcggttaaggcaaatgtcagatacagatctgccgctccgccgtttgtaataaagatttttgaaccgttcagaatataggaaccgccttttctcacggccgttgttttcaggcctcccgcatcagatccggattgaggctcagtaagtgcaaacgcccctacatattcgcccgctgccagctttggaatgtacatttgtttttgggcttctgtcccgaaatgcaaaatcgggtttgtccctaccgatgtgtggacggataaaataacgccgacagccgcgcttacttttgatatttcatgaatcgctaaaatataagatgttatatcagcgcccgctccgccataagcttccgggacgggaatccccattaaccccgcttcccccatttttttaatcagccggtccggaaattcatcggttgtttccatgatctcaaccatcggcgcgacttccttgcgcgcaaaatcacgcaccatttttctcatcatgatgtgctcttctataaaatgcacggctgccgcctccccctcatgatttttatgtcatctgttgtactcataaaaaccgcgcccgctttttttgccgagccagccggcgctgacatattttctgagcagagggcatggacgatatttcgaatctccgagtcccgaatagagaacctccataatggaaaggcacgtatccaatccgatgaaatcggctaatgttaaaggccccatcggatgacgcatgccgagcttcatcacatcgtcaatcgcttcctttgaggccgcaccttcgtaaaggcaataaacggcctcgttaatcatcggcattaatatgcgattagatataaagcctggaaagtcattgacttcaacaggtatttttttcatctgaacggcaagcttctttactgtttccgatgtttcttccgacgtggcaagccccctgatgacttcgacaagctccatgacgggaaccggattcataaaatgcatgccgattactttttcaggccttttggtgacagcggcaagctccgtaatgggaagagaagacgtattgcttgccaatacggtatgagggggacacagtttatcgagtgtgccgagcaattcggcctttgcttttttgttttcggcaatcgcttctattacaaaatcagcatttcccgcgtccgttaattctgccggggaaatgcggctgaaaacggcatctgtttcatgctgtgtctttcgtcctttcgcctgatctttctccagatttgttttgatgcggcgaaggccttttgtcaccatttccggctcccagtcgtataacatgacggtaaacccagcttcggcagctgtctgtgcgatgccggctcccatctgtccggcacctgcgaccatgattgttttcatcttcatctgacgctcccttcgttatatcagtacacctccagcaggacggcgtctccttgagccgctccgctgcatattgccgctatgcctaaacctccgccgcgccgctttaattcgtatatcaaactcatgatgattctggctccgcttgcgccgatcggatggccgaacgcaattgcccccccgttaacattcactttctcccggctgaacccggctattttttcgctcacgaggacgacggacgcaaatgcttcattcacttcaaacaaatcgatgtcgtcaacggacaaaccggtttttttcaagagccggctgatggcttctcccggcgcgcttgcaagctcggacgcttccagtccgacagacgcaaaaccaagtatcgcagcgagcggtctgacatgctgcttcgcggctttttcctccgacatcagcacaaatgctccggcgccgtcatttacaccgggagcgtttccggcggtgaccgttccgtcggctgtaaaaataggtttgagctttgcgagctggtcaaggcttgtatccggacgcagcccctcatctgctgcaacagtatgctgtttgccctttttgccggtccaggtgacggggacgatttcttcatgcaatttacccgtctcagctgcctcagccgcgcgtttctggcttaaaagagcgtaatgatcctgttcatctcgggaaatgccgtactttttggccgcagagcttccgtggacagccatatgcacctgatcaaacgcacaggtcagcccgtcatgaaccattaaatcctgaaaaaccccgtctcccatcctcacaccccagcggccggccggaatggcgtacggaatgttgctcatgctttccataccgcctgcaatcagcacgtccgcatctttcgcccggatgatttgatcacagatggtaacggctctgagccccgatgcacagaccttattaatggtttcagccggaacggaccatggaagcccggcatgcctcgcagcctgccgcgccggaatctgccccgcgcccgcctggacgaccattcccatcaccgcaccttctgcttcactttcactgatgccggcgcgcttgattgcttcttttatggcaatgccgccaagctcggctgcttttacctcttttaatgccccgccgaattttccgaacggcgttctagccgcactgacgataaccgtttttcccacacttttgcctcactttcaataagataaaagataacgcttacacaaaacgccctgttccaatatatgaaccggctgaccaagttatgatcgccccgtgctgtttctgcccataaaaaaagaggactgtctgaacagtcctctagttgcagcattcttcttttattgaaagagccagctttggataatcggtaaaaaatgcgtctgctcccgcttttatcagctgcttcatatcttccggccgattgacggtgaacggacggagcgccgcttggtgttttgcaagatgtttgatcacttcagcgctgaccgccggcgtgccgagcttcggatgataaccagaagctggaattgaagcaagataccgttcaggccggtaaagcacatccatcgtcagcaccgcccgttctatctcaggtgccagggcgtggcaaagcgcgaggctctcatgattaaatgaagaaaaaataacgcgctgttccagtccgtaatacctgacttttttgatcacttcttcttccattccctcgtaacggaacacgctgtttttcagctcaatattgatcagaaaatcagcacgctccgcaaaacgcagcacgtctgacaaaagcggaattctgactcctttaaacgaatctttccatttgccggcggcatctgcggttctgattttctcatacgccgtatctttcacaaatcctttcaaagacgtcgtacggtcaagggtttcgtcgtgaataaccacgattcggccgtcttttgtcatttgtacgtcaagttcgattccgtcagctccggcctcaatcgctttcgtgaacgcgagcatcgtattttcgggatagtcgcccgacgccccccggtgggcaaaaatagtcgtcatatgtgtcacctcaggtgtttgtcatcggttttctctattataatcgttatgcacataaggagggcgctatttacatatattttataattattgcccgctgtaataggtttcgattccgtttacaacagcgtctgcggcatgctcttgtccactctcgtttttcagcttgtccgcatcttgagaatttgtgataaagcctaattcagccagcacactcggcatttttgaatatgtaatgacataaaaaggggcttcttttacacctctgtccctcatctctaaagacgagacaagctgctgttgaatgtcagaagcaagcctctcactgtctgctccttcatatgttgaattaaaatacgtctctgtgcccgatgccgttgatacggctgaattcgtatggaggctgacgaataaatcggattggctggcgcttgctttcgccacccgctcgtccaaacttaaaaaagtatcatccgttcttgaagcaacaggttttgcgccttctgcctccaatttggcgatcaccttgtttgacaccgctaaattgatatttttctccagcagtccatttccgccggccccgctgtcttctccgccatgcccggcatcgatataaatggtttttccttgcacagattcagctgcataagcggacggtgcaagaagaagcagagcggcaccgaatgctgcagcgctttttgtcagtaaacccacgtgttttcctccccgttctttacatatctgtttctcttttcagtttttcaagccgtaattgtccgttgctctcttttttataggtgatttgcaccgccgtatgttcaggcagagactgacattcaaaccgcttagaaaaaggcaccttcacctcttgccgctctccgtcaattttcaccgcgatcgtatcgtttccggacgcttttatgaatgttccttcctgtgtaaatgacggcgccgaatccgcctctgcggtatactcgcagcctgataacagccatgcggtgaagatcagaagtatgacagatatgacagacttcacacagatcacctcacgttttctcattcggctttatctttgaacagaatgggcgatttgtaaagggcgccttcgttcctccagtgcttttccatatttggaatgaaggatttctgacccgctgattacctgaacttagaaagaaaacgagctgatccgtctatgaaaaaggttctgtctgaagagcggatatgcagaatttaacggaaacggacgactttctattcattttgataaaatatcaggtcatcaaaaaaagagagcctcatcatgcgctctcccgaatagaattgttcatatttattttgagtttttcataaaatgaacgggacaacttaaaagagcagcgtattgacggcaatgatgagaataatcactccgctcagcaccgtgctgaactgtccgacatggaaagatccgatgcgcaatgacgaagctttttttccaagcaagcagccgagccatatggtcagaaaacttccgaacgccgcagtgatggaaattgcggcgggagaaagcccgatcagacctgcgcttaatccgttagtcagcgcatttgcggatacggccactccgaggaccatggattccaatataccgatttctcccgaaccgtcagcatctgctgtctccgggttttgtaacagaccggcaaaacggcctttttttcttgatgacacatcagcacgcgctgaattttctttttttctcggcacagccagcaggatgatgcggatgccgatgacagataagataaaagccgccagcaagacgggaaaaaaaccaggcagaacggctgaaatccatttgccgaaataaatcccgatataactgaataaaaaacagataaaagcgatcatcatatttgacgcgtgcgatattttgatctttctgatgccgtatgacatccccactcctaaattatcaatgctcgaggacactgccaaacctaaaatcaataaccaagccatgttattttctccccattctttgatgtcttttcaacatgttgcgctgttgaatctacactatcctattcagcagtacagaaaaggtaccttttctgcaaaaaattattgactgattatcatcattccggcggaaacgaggtgacacccttggcagaaaatgaaaataatacattgggcccccttttaaaatcactgcttgataagcactcgctctccatgagaaaactcggcgccttaaccaacattgatacggccaccatctcccggattataaacggcaagcagaaggccaatttaaagcatcttcaggaattttcaaaacacctccgcaccccgctggaggaattgcttgaggcgtcaggcatagacatcggccatgataaagaagctgcgccgcaagatccgatgcacgcgattcaggatatgctgaatatggcggagatgtttgatcagcctttttcccgggagcaaattgaacgcgagctgaccagatatgaacaatatgccaaaacccagcagggccatcgcctgatttgtgatgagtttcaaaagaaaatggataacgaagaaagcgtcggcccttttattgatcacttgaaaaacatgcatcatcaatatatggatgaatcaacaccggctgaagaccgcgcgattctcgggagcgcgctgctgtattatattttggcgacggacgtcattccggattacatgtttccgatcggctatctggacgacgcgatcgccgttcaaatcgctttgcatcggctgaaaaaaaagtaaaggcgcttaaaaaagcgcccttttttgttgaaaaatatgaaacaccgcattacggttttgtcaaaacagagacagctgtcatatgatacattaacctaacaaaaaggagggtgtcttctatggacagcaacacagttgtggcagtgtgcgctctgttaagtgttgtgattcagatcggaacgatattcgccgcaggaaagtggaaaaaagaataaaaaacaaattgacggttttttcgcacaagcgtatgcttataaataatcttgtaaatgattagaaagaagttatgcatatgaaaaaaatcattctcctcttcgccgccgctgtcatattcagctcgatcggccatcaaatttcaggcggatataaagatcccgaaaaagaacggagaaaaccgttccattcatttaaatggttcagccgatcataatctcaggataaagcacaggcaaaataattgcacacaattaaaacataagctagaatacggacgagttaaactcctaaggaagaaggcgaaatgatgaaacaaatttataaaccgctgtttgaaccttttacgtttgaaagcggcgttaccataccaaaccgtatttctgtcgcaccgatgacacactattcatcaaacgatgacggaacaatttcagaccgtgaattaagctacattactccccgttcaaaagaaatgggcatggtcattacggcatgtgcaaacgtaacacctgatggcaaagcgtttcccggccagcccggtatctatgatgattctcacattcccggcttgaaaaaactcgctcaggcgatccagtctcaaggagcgaaagccgttgtgcagattcaccatggcggattggaatgccctcctgaactcgtgccaaacaaagacgtcgtcagcccgagcggctcagaagaagacggcagacaaacttcccgggctcttactgaacaagaagttgagcacatcgtaaaagcattcggcgaagcgacacgcagagcgattgaagccggctttgacggtgttgaaattcacggggcaaacgggtacctgattcaacaattttattctccgaaaaccaatcagcgcacagaccgctggggcggaagcgatgaaaaacgccttgcgttcccgcttgcagtcgttgacgctgtcaaacaggcgattgctgcacacgctgaaaatccatttgttctcggctaccgcctgtcaccggaagagccggaaacacctgggattacaatgaaagaaaccttcctgctcgccgacgcgcttgcggaacaaaacttggattacctgcatatttcactgatggacgtcaattccaaagcccgccgcggcgcagatacttcacgtacacggatggatttattaaacgaacgcgttggccataaagtgccgctgatggcggtcggttctatctataccgcggatgaagcgctagccgtattagaaagcgggattccgctggtggctctgggacgtgtcattctgatcaaccccgaatggtcggtgctgatcaaagaaggccgcgagcaggaaatcgaaaaagcaataaaagcatctgaaattgagaaataccgactccctgaaccgttatgggaaatgatccagaatacaggcggctgggtgccgtttgaaaaataaccacaaaaaactgccggatgtccggcagtttttttggttcataaatttttaccgctttgtttactcctatttctgacacactgcgtacatatagtaaatagattaatagaaaggagaccgtatatgatggctggatttcctattacgattaacagtctttccggaaacggggttgtcaatgtcggcggcgcgttttcgataagtcctttaaccgtatcaaaaacagtctacggctcaggaggaggaaatatcggtatggttctgcaaatgaatcaatccagcacggctcaatcttcaagttctcaattctctgatcaaaatgtaatgaaaacactatgatatctgtatttccctcctattccggctcacagcagccggatttttttaccgttttgtttaatcttatttcagatcacagcgtacatatagttagtagacttagagagaaaggagaaaaaatagaatgagcggttgcccgattacgataaacaacgtatcaggaaacggagttgtcaatgttggcggcgctatatccatcagtccggtgactgcatcaaaaaccgttttcggtgccggaggaggaaatatcggtattgtcattcaaagcaatgctgtgagccaggccaaaatgtttgagcatcaattttcagatcagaatattgtgaagtcaatttaagggctgccacgcagcccttatagacacgtaaagcgtcaatataagcaggccgacagaatcactgaaaacaatcagcggtcaccttctcatgttttgaatgatttcagttaagagtgaatagaatgcagattgaaagcatgaaaacacgacagtactgaatctcattacggaaagaaggaatcgcgatgaaaaaactttgccgggaagtttggattgaagttgaccttgatgcgataaaaaagaatatacgggcgatccgccgccatattccgaataagtctaagattatggccgtcgtaaaagcaaacgcgtatggccacgggtctgtcgaagtagcgcggcaggcactggaaagcggagcgagcgagctcgcagtcgccagcgttgaagaggggattgtgttacgaagagcggggattacggcaccgatccttgtactcggctttaccgctctcagctgtgtgaaaaagtctgccgtctggaatataacattgtcagcgtttcaagtcagctggatcaaaaaagcgaatcagatattggaagaagaagcggtttcgaaacggctgtccattcatattaatgtggataccgggatgggccggcttggtgtacgcacagaaaaagacctgttagcagttgtaaaagcgctcaagtcgagtacatacctgtcatgggacgggatctttacccatttttcaacagcggatgaacctgatactgaattgacgatgctgcagcacgaaaaatttatcagctttctccgttttttaaaagatcaaggcattacgctccctaccgtgcatatgtgcaacacagcagccgctatcgctttcccggaattcagcgccgatatgatccgtttaggcatcggtttatatggattatacccgtccgcctatatcaaggagctggatcttgtaaaactcacgcccgcactcagtttaaaggcgcgtatcgcttatgtgaaagccatggtgacagagccccggaccgtcagttatggtgctacatatatcgccgaaccgggtgaaatcatcgcaacaattccgatcggctatgctgacggttactcgcgcgccctttccaaccgcgggtttattctttatcgcggcagacgggtgccggtggcggggagagtgacgatggatatgattatggtcagtttgggtgagagtgagggcaaacaaggagaagaagtcgtcatctacggtaaacaaaaaggagccgagatttcagttgatgagattgccgaaatgctaggtacgattaattatgaagtcgtatctacgttaagccgtcgcgtcccccgcttttatatcagagacggcgagatcatcaaagtatcagctcccgtattatacgtgtaggtctcataaaccccgcttttatgcagcatcaagattcctcggaccagagggattttgcttatgtataaaaattcagatgccggtgcgagtgattcacttttttcaccggcaaaagcacaaaacgccttctcttccgcattgattcacggaaaagaagacgaaaaaagacatcctgccattcagcttgcgttatgaagcattatgctccaatctcagcttgtcagcaaccatcgcgatgaattctgaattggttggttttgcttttgtcatgctcacagtatacccgaacagcgaagaaatggagtcaatatttcccctgctccatgcaacttcaatggcagggcggatggcccgttctacacggcttgcggtcgtgttgaattttttggcgatgtcgggataaaggacttttgtgatgctgccgagaagttcaatatcgttatacaccatggaaatggcttcacgcaaataaagatagcctttgatatgggcaggcacaccgatctcatggataatgcttgtaatgctggcatcgagatttttccgcttcggctcaggctgactgcggataatgctgctttgcgcggacggcgcacggtgtgtgacgctgctgacattgccgcttacctggcggatatggccgacaaggttttccatatcaaacggcttcaggatgaagtaggacgcacctaaatcgacggcttttttcgtaacgtcttcctgaccgaatgccgtcagcatgatgacgttcggctgcttcgcaagttctgattcccggaggcgctccaaaaccgcaagaccgtccagatgcggcataataatgtctaaaacgagcacatcgggatttttatctttaaacaaagaaaggcattcctgtccgttataagcaacgccgagcacttccatatcatcctgtccctctatatattcactcaacaggcttacaagctctcgattatcatcagcaacacaaactttaattttctccacgtttcttcctcccccaatgtattaacaggacgcaacccatttgactgctacatgttacattcgacaaaaccactacttccccttttaaaaaatccatttttaccaataatagtggtatatctttgtttttctagcattttctaggtttttcgactaaaaattaagtttgacaaatcaggaaacgtgaatttgtcgaaaaatcttcatgtcttattttacatgaatccaggaaagaagtgaagaacgcatcaaataaaaaaactgccggatcatccggcagtcagcttgctttatcttttccgtaaacatcaacgcccgcttcagaaagcatccattcgatatgaaccccgtagccgcttgtcggatcattgacaaacacgtgggtaacagctccgacgactttcccgttctggatgatcgggcttccgctcattccctgaacgattccgccggtttttttcagcagtttcggatcggttacctttaataccataccctttgtcgccgggaatttttgcggcgtggtgctgacgatttcaatatcaaatttctctactttatcgttttcaataaccgtcagcatttgcgccggtcctttttttacttcatttgacaaagcaatcggaagcgctttgtcggaaatattgttttgaatcggctgatgcagtttcccaaagatgccgaacggactgttgcggttaatatcgccgatcgttttccgttctgacgaaaaccttgccagtttttcgccgggattgccgccttttcctttttcaatggaggttacagttgaatggacgatttctccgtcttctacaacaatcggttttttcgtatccatatcagaaatgacgtggcccaatgcgccgtatttttttgttttcggttcaaaaaatgtcatcgtgccgatgccggctgccgaatcgcggatataaaggccgattcgatattttccttcagcttcatcctttgtcggaatcagctttgtcttgattttttgcttatcgcgtttcaccaataaatccaatgattctccggttgtgcccgctttttgaataaacggggcgatatcgctcattttttcaattttatgtccgttcattttaataatgatgtcgccagattcaattcccgcttgttctcccggagacttttttccatcctttgtcatcacctgatgaaagccgacgaccaaaacaccgactgaatgcagttttacaccgatggactgtccgcccggaatcacctttaattcaggaagcacacgcactttcgtttttttaatgggaaatccggcaagatcatatactacttctgaccggccttgtttttgccctgttatgtttgcatgaccatgctcttctttcagcgtaaaggcttctgataattcgcccttttcagcgcttattgatgcattgaccggaacggcttgtgtctgtttttcaaagacgctcatttgcgacggtatcagtaaatattctttaaacggcttaaaaaagcctacacttagtaaagaaacaaggagaattacacctattgctttcctcatgttatcgtgcattcattccttcactctcctcgctcctatcccacaccactttctttttctgctacatctatacttttgccttcctgcgcttgatttataaccggcatacgaagaaaaacattggatacactgttagagaaatggaacaaaaaaataagctgcctgtatcagcagcttatcctgtcgtttttacctgtccggcctgttttaaaagctcttttgcatgccgttttgtcagatctgtcacttcgacgcccgcaatcatgcggccgatttccgctaccttgtcctgctgggaaagcggcgtgacatgcgtcgtcgtccggccgtcttttaattctttcgcgatcaaaaggtgcgtgtccgccatggcggcaacctgcgggagatgtgtaatgcagagcacctgtgaaccggtagatactttatggattttttccgcgatggcctgcgcaacccgcccgcttacaccggtgtccacttcgtcaaagatgatggaagtgacatcctgctgagaagaaaaaatactctttatcgccagcatcacccttgaaagttcgccgccggacgcaacctttgacagcggcttgagaggctcaccggtatttgttgaaattaaaaatttcacaaggtcaatgcccttttgggtaagctgcacgggctggccgttgacaactggcgcttcatcggctgacggatcggttttcacaagaaattccgtatcaaacgtagatttgcccatatacagactttttaattcctgatgaatcgcttcagccagttttttggcccatgcttttctgatttttgataagttggcggcttctacggccacatctttgcccacggactccagttccttcttcagcgtttcaaggtggctgtcacggttctcgatttgatcaatttcctcttctatctttgagccgtattccagaatatcttctaccgtcgctccgtatttgcgcttcagctgtttaatctcgtttaaacgggtttcaataaaattcagccgttccggatcatattccagatcatctaacaaattgcgcatctgaaaggttgcatcttccagcagataataggaacttgacacagtttcggacagcttttgcagcggttcattgatatccgaaatgtcttcaagctgggcagaagccattccgacccagtcgagacccccctgctcactgcggagcgcattataggcgttttgcaatgattcataaattttctcaaagttggatatttgcttccgttcttcctgaagaagctcgtcttcattcaattcaagcttagccgattcgatttcttcaagctgaaattggatcagatctaaccgatgcgccatttcctgctcgctctctgacagcttcttcacttttttgagcagcttcatataacggtcatagccttcacggtaagcctgaagcgctgattcggcctcagcgcccgcaaatttatctaaaagctctaaatgcttgtcgtcctccattaacagctggttatcatgctgtccgtgaatatctaataaaagtctgccgatctcccttaaagccgcgatcgttactaattttccgttgacacggcagacgctttttcctccggcattgatgtcccttctcatgacaatcatgtcgtcagatgcgtctattccctgctcacggcacacctcaaaaacgggatggccgctgtctaaaagaaacagtccttcaagctcggcctttgtttcaccgtaacggacaaattcagacgacccgcggccgccgactaacagggaaacggcgtctataataattgacttgccggctcctgtttctcccgtcaggacggtgagcccccgttcaaacgagatcgtcagttcctctataatggcaaagttttttattgatagttcagctaacaaacagcattccaccttttatctgataattacgctacagcagctccaaaagacggctttgaacgccttccgtatcttcaggcgtcctgcagatgatcaaaattgtgtcatctccgcaaatcgtgcccatgatttcctcccattcgagattatccatcaaagcaccgattgcctgagcattccccggcatcgtctttaatacgatcatatggcttgctgagtcaatttttacgaacgcatccattaatgaacgcttcagttttgacagcgggttgaaccgctgatccgccggcaggctgtatttgtaggagccgttattcgtaggcacctttacgagatgcagctctttaatgtctctggaaacagtcgcctgggttaccttatacccttcttctctcagcatgtcaactaagtcatcctgcgtttcaatctcctggcttgtaataagctctctgatttttatatgcctttggccttttgtcatgtaagcacctctgttttcaagctgttcttgtcattatgttaaccgcttcttgataaaaagtacatgatggcagaaaaaaggaataatagccccctattattccggtacatctgtctttttggcttttaatgtctcatgtgcttcgcggacggtacggagaatgtcttcttccggcagttcagtgccgtttccgtcttctccctcccagttcagatgaagcagaaactcaatattgccgtctccccctgtaatcggtgagaaggacagtcctttcactgcatatccttcagaggcggcaaattgattcatacggcggagaacgtcagcatgaacgccgggatctctgacaatgcctttttttccgactgattcccgtccggcttcaaattgcggcttcaccagagcgatacaatcgcttcccggtacaagcagcgtttttaaaaccggcagaatgaggcggagtgagatgaaagacacatcgatcgtcgcaaattccggcaaaccctctgtgaaatcagaaggctcggaatagcggaaattcgtccgttccattacgacgaccctctcgtcctgcctcagcttccaagcaagctgattatagccgacatctactgcgtatgaccgctcggcgccgttttggagggcgcaatctgtaaatcctcctgtcgacgagccgatgtcaatcatcgttttgcctgttactgagacagggaacacctcaagagctttttcaagctttaatccgcccctgctgacgtatttaagagggtttccttttaccgttaacggaagatcccgggcgattttttcacccggcttgtccaatcggttttcatttgagtacacgatccccgccataatggcgcgtttcgctttttcccgcgtctccgcaagtcctttttctacaagaagtacatctaatcgttctttttttgctgtcatgatccaattcctttatgtgtcttcggcggcatcagcagtttaatccggttcataacctcagccttcgtgagaccgatttcttcaagcagggcggttacgcttccgtgctcaataaaccggtcagggatgcccattctgtcaatcggcgtatgatacatgccgaggtcatgagcgaattcaagaatcgtgcttccgaatccgccttcaagcacggcttcttcaatcgttaaaatcggaagaccttcattaagaatcgccttcatcatttgtttatcaatcggttttatgaaccgcgcattgacgacacgcacggacaggccttctttttgcagttcttcagctgcttcaagcgccatctcaatcgttgttccgaatgttaaaataaccgcgtcttttccgggacggagcacttcccatgttccgatcggaatgcttttcagctctttatccatctttacgccgagtccgtttccgcgcgggaagcgcatcgcaatcggaccttcttcatagctaagggctgtattgaccatatggcggccttcattttcatctttcggcatcatcaaaacgaggtttggtatatgacgcaaaaaggcaatatcaaagacgccttgatgcgtctccccgtcagcaccgaccaaaccggcccggtcaatgccgataaatacattcgcgttttgacggcagatgtcatggacgacctgatcgtaggcccgctgcaaaaaggtcgaataaatcgcaagaaacggcttcatgccctgaagcgccattcccgcggccattgtcgccgcatgctgttctgcgattccgacgtcaaacatgcgctcaggaaattctttcgcaaacccttccagcttagagccgacaggcatggccggtgtaatcgcgacaattctgtcatcctcacgcgccagctcctgcacggtgccgctgacaagcccgctccatgaaggcgccgcggctttcggtttgacgaaatcgcccgtattgattttgtacggacccgtcccgtgccatgtgccgatcgtgtcggtttcagccggtttatagcctttgccctttttcgtgatgacatgtaaaaggacaggacctttcgtttttttggcgtattgcaggttttcaatcagttcgtgataggaatgaccgtcaaccgggcctaaatacgtaaagcccagctcttcaaaaaacatgcctgacacaagcatatattttaagctgtcttttatccgttccgctgtggcggccaattttccgccgacggccgggatgcgcttaaataaatattcaagctcgtcttttacccattggtatttgccggccgtgcgaagcctgcccagcatagaatgaatcgccccgacattcggcgcaatgctcatctcattatcattcaggatgacgatcatgtcttttttctcatcgccgatatggttcagcgcttcaagcgccattcctccggttaaagccccgtctccgataatcgggatgatatattctttcgtccctttaatatcacgggcggcagccattcccatcgcccctgagagcgatgttgagctgtggcctgtttcccatacgtcgtgttcgctttcgctgcgtttcgggaaaccgcaaagccctttatattggcgcaaggtttcaaactccttgccgcgtccggttaacagtttgtgaacataggactgatgtccgacatcccataaaaatttatccttcggactgtcaaattctttgtgaagcgcaattgtcagctcgacaaccccgaggttcggcccgatatggccccctgaggcagacagcgatgtaatgagaaaattgcggatctcctcactcagctcttccagctgttcaattgacatctttttaagaaatgacgggtcctgtattgataaaagatccaaagcggatcaactcactttcagcatgaatttctgcaaattaaacagtgtctttttgaaaaaagaaaaagactctccttgtattttcatcgaaactgcttacattttaccataggagcggcagccccttcaaatcgggatcgttttaatgatctctcgccgcaattaagtcgcagagatcatgcagcaattctttctcaagagaaaggccgcttacgatctgtttcgcctcgctgatatgatgcgcaagcttctctttcgcgccttcgagcgttaaaagcgacggatacgttgacttttcattcgtcgtgtctgaaccgaccggtttgccgatcttctcctcatgaccttcgatatcaaggatgtcgtctctgatttgaaacccgatgccgatatggctgctgaacaagcgcagcttctcgatttcatcctccggcgcatctgccaaaatggcgcccgccgtcacggaaaaaccgaggagcttggccgttttccgctcatgaatggattccagctctttcagcgttacctgcttttgctccgcttccatgtcggcagcctgtcctccgaccatcccttccgttcctgccgcgctgatcagttcatcgacgagacggagccgtttctcagctgaaacctcctcagacacgtgagatgtgatcaatttaaagctttctgtcagaagcccgtcgccggcaagtacggctgccgcttctccgaagactttatgatttgtcggcttcccccggcgcaaatcatcatcgtccatgcaaggaagatcatcatggattaaggaatacgtatgaatcatttcgacagcgcatccgaccggaatcccgtctttttcatcttttccgtaagcattcaaaacggccaaaacaacgagagggcgcagccttttcccgcccgcttccaaagaatacagcatggattttttgagggattcgggcatgtccagccgttctgtatacaaagaaagctgctgttcaatcatttgtttgcgtgatgctaaaaatgcgtccagtttatttgtcaccttcgtcttcctcctgaacgctgaaaggtgcaagttctccgttatcttttagaataaagtccatttgtttttcgacatgctgaagcttttcatggcacatttttgaaagggccatcccttcctgaaaatagttaatcgcctgctccagcggcacgtcgccttcttcaagctttgccacaatgccttcaaggcctttcatcgcctcttcaaatgtcagctcttcactttttttggtttctttcattatcgttcgcctctcttttgcaatacttcacacgtcagaacgccgtctgtcatctttacttcaagcgtgtcattttgttctacttgatcaacgcttttgatcagctctttgtctttataggccagactgtatcctctctccataacttgaaggggacttaatgcattcagtttaccaagaaccgtctgaaactgcgaatgaagctgcttcagctggacattcatgctccgctccagctgatttgagcgctcttcgtaccgtttttttgcctgtttcagctggttttctgggtgaagggccgttaatctgtacgtattccgctccagctgcctttgcttccggtccgtaagccctgtaagctgtgattggaactgctgatacaaaagatcaaactgctgttctttttgagtatacaatcgtttcggaaaacggaatgcgtaggatgactggagcgcttgcacccgttcttttttcttgctgatatgctgctgcatcgctcttgtcagacggacttccgccgtttttgtccgttccattaagtccgtcgtgtggggaacggcgatttctgccgctcccgtcggtgttgcagcccggatatctgcgacaaaatcactgattgtaaaatctgtttcgtgtccgacggccgaaataaccggaatggcggaagcaaagatcgcccgggctacgatttcttcgttaaatgcccacaattcttctatcgagccccctccccttccgacgatcaggacgtcgcacatcttttgtgcattggcttcttcaatgcgctttacaatcgatctgctggcattctcgccctgaacgagcgcgggaaggacaatgactttcaccaaggggtatcttcttttgagtgtggtaatgacatctctgacggccgctcccgtcggtgacgtgacaaccccgatcgtggctggaaaagcggggatggcctgcttatgccggtcatcaaacaacccttcgccggcaagttttttctttaattcttcatatgctaaataaagcgcacccacaccgtccggctgcatttcttttgcgtatagctgatagcttccgctcggttcatagacggaaatgccgcctcttacgatgaccttcattccgtcctcgggcttaaacgcaagccttgaactttgtctttgaaacatgacggcctgcatgcgggcatgttcgtcttttaatgtaaaatagatgtggcctctcgtatggattttaacgttggacagctcacccttaatccaaatgtcttcaagatgagggtccacatcaaattttcgtttaatatatttggtcagtgcggaaaccgtgacatatgccgcttcactcacatcctgcactcctttcataaaggctttttgccctaaactaagaaaacccgctctggctgaaaggagccttaagaagcgggtatcgtgctcattgtcacactttttgtgactgtctccggttatctatgataacgtacgtctggcagatttaacagtattatgcgcaagcattgtgatggtcatcggacctactccgcccggcaccggcgtaatgaaagatgctttttctttcgcttcatcaaactgaacgtctccgcagagttttccgctttcaagacggttgacgccgacatcgatgacaatggcgccctctttaatttgatcggctttgataaagttcgctttaccgaccgcaaccacaagaatatctgcttttttcgtatgctcagacatattttttgtacgggaatggcaatatgtgacggtcgcattttcgttcagcagcagctggccgaccggtttaccgacaatattgcttcgtccgactacaacaacttctttgccggaaagatctacgttcgtctttttcaataactcgacaattccgtgcggcgtgcatggaagaaatgtatcttcgccaagcagcattttcccgacgttgagagggtggaaaccgtcaacatccttatcaggggagatccgctcgattacggctttttcagaaatatgatccggcagcggcagctggacgagaatgccgtggaattccggattttgattgtactgatcaatcacttttaaaagctccgcctcggttaagcttgagtcaaaacggtcaagcttaaacttcattcccattgtttctgcggcttttttcttgcctgtcacataggaaacagaagcgggatcgtcgccgattaaaatgaccgccaagcccggcactacgccttgtgctttcagctcttctacttcttttgccaattgttcgcgtttttctttagccgtttcttttccgtcgatgattgttgcagtcattttctttcctcctacgattcgatatcagttttaatgttagaaagaaccccgtttacgaattttgcagctttatcgtcgccgaaccgttttgccagctcgattgcttcgtttaatgacacgttagcaggaatgtcgtcagtataaaccatttcatacaccgccagacgcaggatcgcgcggtctacgtttgcaatccggtcaagcttccaattgacaagatggccggaaatcatttcatcaagctgtacctgatgttcgatcactccgtacaccagctgttcaaagaaggcatctgttttctcaccatcaagcgcgtgctcaatggcctcgttcggtgcaatatcgctgacatcaatctgaaaaagtgcctgcaaagctttttctctagctgttcttcttttcattttctttctccttcagatccgctttatccgcttgtcgttaagcttaaagagatcataacatatttttttcccaatcgcatgtcgaaatttaggttttttcaccctaatgccgaatatttttacaaacccttttgatttcattcggatttcacagcatgaagaaactcggctgccgtttgtaagccggctttcttcatgcctgaaatgaagggaaacgtataaaaaaccaaagggctgcccatccccttggtttttatacgctcattacatttcttcgtcgatttcgacttcttgggccttcgtgtcaaattgaatgccgacgatatgaatattgatttcattaatggtcagagacgtcatgtttaataaagtttggcggatattctcctgaacgcttgctgccactttcgggatcgaaaccccgaattgaacgacgcaatagacgtcgatagtaatcccgtcatcggctaaatcgacctttacgcctttgccgtgattgattttgccgaaacgttctacgacgcccgtggcgaaattgccgcgcatttcagcaattccttcaacctcggaagcggcgatgccggcaatgacttcaatgacctcaggagcaatttcaaccttgcctaaatgagactcatcatgatccattttaagcacactgttgtcttccattcaattcacctcccgcaaaaattatgagcccattacatcatatgtttctaaaaactttgtattaaactctccgctgacaaatgtttcgtgttcaagcagtttcagatggaacggaatcgttgtttcaataccttcgatcacgaattcgctcagcgcgcgtttcatccgtgcgaccgcctcatcacgtgttgttccgtatgtgatgactttggcaatcatactgtcatagtacggcgggatcgaatagcccggatatgcggctgaatccacacgcacgccgagtccgcccggcggcaggtacatgttaattttaccaggtgaaggcatgaagtttttcgcaggattttcagcgttgatacggcattcaatcgcccagccgttaaattctacgtcttcctgtctgagcgagagctcctgtccggatgccactttgatctgttctttgatcagatcggttcccgtcaccatttcagtgacagggtgctccacttgaatacgcgtgttcatctccatgaagtagtagcgctgctctctgtagtcataaatgaactctacagtgcccgctcccgtgtaaccgacggccttcgctgcttttaccgctgcttcgcccatctgctccctgatttcagaatcaagcgcaggtgacggcgactcttcaagaagtttttgcagacgtctttggatagaacagtcacgctctccaagatggatcgtgtttccgtaattatccgcaagcacctgaatttcaacatggcggaaatcttctatgtacttctcgatgtacacacccggatttccgaatgccgtagcggcttcctgctgggtgatttcaatgcctttaatcatttcttcttctgtgcgcgcgacccggatgccttttccgcctccgcccgcagtggcttttataatgacaggatacccaatttcacgtgcaagtgaaaccgcttcttccgtattttttataattccttttgaaccgggcacaatcggcacgcccgccagttgcatcgtctcacgggcgatatcttttgtccccatttttgaaatggcgtctgccgtagggccgacaaacgtcacgtttacttcctcgcacagctcggcaaagtcggcgttttcagctaaaaatccgtatcccggatgaatcgcatccgtgccggtcagctttgcgacgctgacgatattcgttacgtttaaatagctttcttttgatgttttcggcccgatacaaaaagcctcatcggccatttggacatgcagggcgtctttatctgcctcagaataaacggctacagtttcaatgccaagctccttgcaggcccggatgattctgacggcaatttctcctcggttggcgatcaatagctttttaatcataatagcaggtctccttactcagcttttacaagaaatagaggttgtccgtattcgaccagctggccgttttcaactaacacttcaacgatttctccttttacttccgcttcaatctcgttaaagagtttcattgcttccacgatacaaaccactgtattttcgctcacttttgatccttgatttacgtaagggccggcttcaggcgatgaagaagcataaaacgttccgaccatcggagacgtaattttgtgaaggttttcgtcttgtttcggcgcttcctgaacaggagcggcttcacccgcttccggttttgcagcctgcggagcaggtgcgaaagcagcaggaacagcttgagcttgtcccgttacattcacggccggcgcttcattttttttcagcttcaggcttacgccttcaatttcgtaaacaaattcatcaatggatgattcatcgattctttttatcagttcatgaatttcgttgatttttaacatcagttccactcctatgtatgaaaaatagaaatttatgggttgctactaaaagtacatactatgtttatcttacaggagcggttgtgtaaattcaacactgatctaaaatgacatcagaaaagcccgcagcgggtgcgggcttttcaggcctattattttgtcggttcaaacgtcacggcgacgtctttcatattcttaatttctttttgcaccaggtcaatgatggcggaagcttttgcgtttgaatgtttgtcagacatgaccgtaatgttgattttgtctccttcagcatccacgagcgcatctttgtagccttgtgttttaatgagtgtttccagctgtttttctgtcccttcagcattactgagcgccgtcattttatcgtaggcttcgcttttttcctttgctgtcgcatcatcgcttgaaacaatgctgtttaactgttcccgttctttgcttctcgcgtcttcaagttccatgcggtatgtggtaaataaattttcgtcagctgtttctgtggcgaccgatccgtctttgtcggacgcttctgctgatgtttctttatcctcttttgcgcctttagaatctttagtgtctttcgtgccttttgttccgtcttctttttctgtgccgccttcggtcttttctttcgtttcaggagcaggagccggcgttttttctgtggcgatttctccgctatttttttcgcttttcatctgcacggcatttttgctttccggcgacgtaatataataaacacttaataccacgacgagactgagcattgttaaaagccaaaccgtttgttttttcagcataatttatgaatcctccttgatttttttaggggcaaccgctacacggtagctcggaacatcaagcacccttgtgacggcatcaatgatggttttttttatttgaacgttgtccactccctgagcgacaacgagtacaccgcggatatcaggctttttcgtctgaacgacgaccggggtttcctggtccccgtttcggatcatgacaatttgttcttcagaggtttgatcggttacgcttcttttgccgccttctttatcggtttcttcagtagtggtgtcttttttcgttttatttttttcaaacacttttaacgatgtcgcgtctacgtttacgacaatcgatacatcctccacgccgataatcgtttcaaggatttctttcagctggttttcataatctctctcgtaatcatcgatcgtgtttttggcgctgctgtcttttgacgccttaaaaacgggtgcgcttttttgcccgctcttgtcttccgtttggccggacatgacagtctgcgccgtttggtccttcccggttttctcaggtgaagagaacatctggctgaccagcataaaagataccccgagcacaaacacgaacagaaagtaatgatattttgtcagttttggtttttctccgtctttcgcctgtccgatcatcagctgttttttgagtatgttccatagtccgtttttattcatggccgtttttctccccgccttccatataaaccgtaattttctcactgccgatttcccatatatccgcaagtttttctttgatgtgtgcagcctcctttttgtcggctgcgccttccggttcgtatttgcggtctgtgcggatgtcgatcggtgcgacggtttgcacggttttttcagaagatggggccatatacacgctgatcgtttttacatcttcttctgaacgaacctgttcttccgctgtaaggcggatgtcatctattttgtattcgtcatgactgaacatctcctccgctttcttttttagttggacagccatttcttctaaaacatatgcgcggtttgatgcttgtatttcttttttttctgatttgatttgattttttatgtcagcggattgaaattgctcttgttttgtcaaataatcgaagatgatttccgggtctgttttgaaaagtttgaatatcgggttgagcatgacaatgattaacagcaggctgacaaccatctttgcgtatttttgcatactggagctgggcagcagcatgtcgatgacgatggcaaataagataaacaaaataatgcttgtcagccattctgttaaaaagctcatatctaatgggcctcctttatttcatcatcatggtgaggttgcctgctgtaataatgactgtaatgctaaggaaaaacatgagtgagacgatggcgagcgccgcgaaaatatacagcacgcttctgctgatgacgccgagacacgtaatgacgggcccgcctccgagcggctgcaaaatggcggccgcgagcttataaataaaagcgagagagagcactttaattgccggaaacgcggagatgcagattaaaattccgacaccgaggattcccacagtgttttttaataggagtgaggcgctgattaccgtatcggtcgcatccgtaaacatccggccgagcacgggaataaaattgcccgttataaattttgcagtcctgagcgtaatcccgtccgtcacggcagccgaagctccctgtacggagatgacgccgagaaatacggtgaggaatacggcaagcgcgccgatcgcgatatttctgagcagattggcaagctgcgtgactttgtattgatccgtcatcgtgctgacgatgcttaaaatcgctgacagaaagatcagcggcatgacgatgttttgaatgagaaggccactcgtattcatcaggaataatataacggggtgaaaaaaagcagcggagacggctcccccggaagaagccaaaagcgcgagcagaagcgggatcagcgcgagaatgaagctggtcatcgtctgaatcgcttcactggcataattgacggcaacatgaaagctgtttaaagcgagaataatcagcaccatataaacgatcgcatacgccactttgctgacggtgctctgctgaaatgcattttgcagaagctgcagaatgacacaaaaaatggtgagaaggatcaaagttcccagaagttttccgtttgcgagcacttcatgaaacaggtaggaaaataaggccttcagccacgcctccggcgagaacgttttttctccgttaataaagtcgatgatgcttcccttttggctttcaggaagaagaccgccgtattctgtcataatatcgtcccaaaactttccgataccttctgttttcagcgcttcggcctgctttttcgccacttcatcagccgattcttgatgaattgcggtttcccgcgccgcaccgtccgttccggcagcttgtacacattcagtctgaaaaaataagaggataaacaaaaaagcccccgcccaccgaaagcgcttcattttttgtgccccctttccatttatgatcaagaaggaataagtccgagaatcgtttcaataataacagtcagtatcggcacagccatcaccagaatcaaaatcttcccggccagctctattttcgaagcaatcgctccctggcccgcatcttttgtaagctgcgctccgaattcagcgatgtaggcaatgccgataatttttaaaatggtttccacatagaccatattgacgtttgcattgacggctattttttctatcattctgataatgtcataaatctggtcaacgagataaagaaagatcacgcagccgctgaagacgacaatcataaacgcgaaagtcggtttctgttcttttacgatcagggagagaaatgtggcgatcaggcctaaacctacaatttgaacaatctcaatctgtaagcccccctatccttggaatagaaacacagctttaatctttttaaacaggtcatcgacaatcgtcgccaccataaataaaatatagataaagccaagcagcgtcacccattgggcatattcttttttccccatttggtccagtatggtatgcagaaacgcaaccacgataccgactccggcgatttgaaaaatgacatttacgtcgactcccattttatgtttgctcccctcatgtttacatcaatagaagaatgagtaacagtccggctaaaaatcctaaacttttcaccattttttcatttttcgcctgcgcccgtccggcatccgcttccgccgcttccaaatgtgtaagcgcaagcttgatatgtttctgctgagaaacccggtcatgaagcccgagcgtctctccgaattgcttcagcacatcatattcgctttttttcatcgccatggaaggccagttatgcttcaggctctgttcccaggccgttttggcggaatcgcttccctgttcaagcctttggctgaaagcttgaaacaatagtgacacaggtttggaaagctgtctggcgatgtgtcccgaggcggtgtgcagcggcgtatgtccgtacataatttccgcttcaagcgattgcagcgccgcacgcagctgacggatctgcctcggcctttcaatatagattttggcgatctcaaatcccgtccatgtcgtcgccgtcagaatgaacacggcccccaaaagcttcagcatgtcatcacgctttcagcatgcggcagctgctccccgtcctttccgtacatcctgctgatcgtgccgggaccgcggcgccttgacagttcaacataccggtcaaacactttttcctcccaaagcattttcagcgacggtcttttcaccaaatctttcatattccatccgtgcgcagatacgataaccgatacacccgcatggagcgcttccatcagcgcttcagagtcttctattctcccgatctcatccacgatcatgacatcaggactcatagagcggatcatcatcatcagcccttctgccttcggacaggcatcaaggacatcaactctgcggccgaaactgtgctggggaatgccccgcaggcagccggcaatttccgaccgctcatcaatgataccggtctttttcgccggaatgcgtttcgatccggtgctggaaagccgggccaaatcacgaagcaaggtcgtttttcctgtttgcggagggccgatgatgagtgtgttcagccagttttctttccataagaaaggaataagcggttctgcgattccaagcttctcccgggcgattcgaatattaaaagacgtaatatcccggagccctttgacggctccgttttcgacgatgactcttccggccagccccacccgatggcctcctctgattgtgatatatccttttttcagctcttcttccagcgtgtacatactgtaattgctgagccggctgaggatcagctgtgcgtcgccggccgtacagatatatgacaaaaacaaaggttgtcctttccggatcagttcaaccggcctgtcgacccgtatcctgatttcttctgtatcccgccatgtttcttctggtacggcggagatggcatgtctcaataattcagggagaacctctgtaatttcattcaatagagtctcctccttttttaccgattggcttctttaaaatgtatgatccgggacagactttatgacacccgggcctctatttatgcacacccgctaaaatcagcaccacccccgcaaaaatcaaaatcaatttagcatatgagagctgtccggcaatctgataaatgccgatcgtcatcgtaatgataaaaatcagcggaccgacgatcgccaaaatactattaaccacaaccgcttttctgatgtcgtttgtgataatcataataatggcggccgataattcaatgagagaggacaaaactcgtaaaccggccatcgttaaaacagtagaattgattgaaccaaacaagaatttcattgcaatcccccaacttcaagcattttgttacactatatgctctagctgacggaagtagtctcactattttcatatagaagaaagattctgttttaaaacgcaaaaaaagcctgccccgtaaaaggagcagactccgaattcctttgactacgctcttgacacgtaagagccgtctgatgtatttacaacaagcgtatcgccttcgttcacgaagaacggtacgtttacgacaagacctgtttccgttttggcaggttttgtgccgcctgacgccgtatcgcctttaattcccggctctgtttcaacaactttcagttcaactgtgttcggcagttcaataccgagcgtttcagattgatacatcatgatgtgtacagacatattttccagaagatattttaattcttcttcgatttggtttgcattcaattcaagctgttcatacgagcttgtatccatgaacacgtgctgatctccgttggcataaagatactgcatcgtttttgtttcgatttgcgctttcgccactttttcacccgcacggaatgttttctcctgaatagcgcccgtacgcagattacgcaatttagaacggacaaatgccgctccttttcccggctttacgtgctggaagtcaacgacgcgccaaatgccgccgtctacttcaatcgttagtcctgtacgaaaatcgttaactgaaatcatgtttgatgtcctcctatattccaatcacaaaataattaattctttaggggaatgcgtaattgtccggttgccgtcctcagtgatgatgatatcatcttcgattctgacgcccccaacttccggtatgtatatgcccggctcaaccgttaccgccatgcccggctcaagaacggccgatgacctgaaagacagtcccggggattcatggacttccattccgaacccgtgtcctgttgaatggccgaaatactgtccgtagccttttgcggtgatgtgatccctcgtcagggcatccgcttcttttcccgtcatgccgggtttaatatgcgaaacaccgagcgcctgggcatcgtatacgacctgataaatttctttcagtttatcacttggctctccgaccgcgacggtgcgtgtgatatcagaacaatagcctttataataagcgccgaaatcgagcgtgaccaagtctcccttttcaatcaatttgccgcttgccactccgtgcggaaggctggatctgactcctgaggcgacgatcatatcaaaggaagagccatctgctccttgacgtctcatataaaattcaagctcgtttgcgactgaaatctctgagatgccaggtttgataaacgtcagaatatgttcaaacgcatcatccgcaatcttcgcagcttcctctaatatcttaatctcttcacttgacttaatcaagcgcaacttttcaacggaatccgcgacgggaaccatctccgcttcttgcagcaccgcttggtaggatgcatatgttccgtacgtcaggctgttttgttcgaagccgagttttttaatgccgtactcaagaatcgtgtccgcagccgtttggattaagcttccgccgtgctcgataatttcaaagcccttcacttgcgccttcgcctgctcggtgtaacggaaatccgtaataaatgccgcacgttctttcgatatgaccgccaagcctgacgaacccgtaaatcccgtcatatactgcagattggcggagcttgtcaccaagattccgtctatatcgagctgaccgaaaagatttcgcaatttctcaagtttcattccctttctcctcctcgccgattcttgactgccgcctgacaccgggagcatccccgcccggttttcagcataaaaaatgttcacttctcgtgaacattttaccataccggacagggattatacacttattcacttgttgccgagcgccctggcaagcttgtctgacgtaagttcattgtaggcgaaggaaatcgagtagccgacaaacaaaccatacagaatataaaggcaaagcgtcgtcacgattgtatctgatttcaattcagtgacagacttcacatcttggaaaatcggattgaataagaaaaaaaccgcgcaccataaaatgacgccgtacaccatccccggccacatggttttaaaacgcttcaggcagacgaaataaataaaagctccggcaatcgaaattaacccgatgacaacgatgctgaccatcgtgccgagccattgttttttccattctccgatcataaacggctgaagaatcatgttggggctgatctctgaaaaatgaaagagatacccgagatagccgatcaaactccaaaatacacccccggcaaatccgataccgcaaattctgccggtaaatgatacaggctgctgatcttcatcctgcttgtttttttcttcctgttctgaatgtttttcgctggtcatcatggcacctccagtcatagaatgccccaaaattgaaaagtcataaaaagttccgccatattttcaatcaatgagtaaaatcttagaaaacagggtatactgcttgtagaaaaagcattgattttccggctgtctaactagaggtttaccgctgtttcctgtacaatagagtgaaaggaaatggttagtaaatcctaagaaaacaggcaggttgataaacaatgtccacacaaaaaacgccgcccgcatacggcggtcaggctgtcgttgaaggggtaatgttcggcggcagaaaaaattatgttaccgccatccgcaggaatgacggaagcattgatttttttaagcttccgagagtgccgaattccaagctttcggctttaaagaagattccttttttgcggggaatcatcgcaattattgaggcaagcgccaacggcacaaaacatttaaacttttccagcgaacgttacgggcttgatcctcaggatgacgccaagctggaacaggaagataagaagggttcgggcttatcaatgtttttcagcctggcggtgatcggcgttctatcgtttttgttcagcaaattcgtttttacgctcgtcccggtctttttagcggagcttgtaaggcccgttttttcctcagacgccgcgcagatcggaatagaaagcgtgtttaagcttatcctgcttctcggctacatttattttttatcaatgacgccgttaattaaaagagtgtttcaatatcatggagccgaacataaggtcataaactgttatgaacagaatttgccaattacaataaaaaatgttcagaaacagtcacggcttcattaccgttgcggttcaagctttatcttatttacgatcattgtcggcatgttcgtctatttactcgttccgacagatccgctttgggtgcggattttagacaggattgcgcttatacccgtcgtcctcggcatctcctttgaagtgctccagctgacgaacaaggtgcggaatatccctgttttgaaggtgctcggttatcccggcctgtggctgcagcttttaacgacaaaggaaccggaagatgaccaggtcgaggttgccatagaaagctttaacgagcttctcagactggaagacatttcagaacagagcgaaaagccgtctgacaacgtaatctgaaccgttacctgttattattttcggaggtgggcagttatgaatcatcgtgtacaacctttttttgctgtattaatagcgcttggtgcatttggtttcatttatgcggcggtaacaaaccccgggcagatgatctcaagagcgattaccgtcattatcgcaggcgtcatcatttattttatcgtgagatcggttctgaaccgccgcgccggccgtgacggaaccgctttcaaaaaagcggccaaacaatcgcggctccgaatgaaggagcaaaaagcgaagcatcgcgccgctcacagagggcgggtcagccatttgcggagcgtgccgagcagcagcagaccgaagccgatgattcttaagaaaaaaagccagacccagcttaccgtcatagaaggtaaaaagaataaaaagaaaaacagagcgcttttttaatagctccattgcttcaaaaattgctctgttctgctttttcctagctcaatgagagctagttttttttgcggtgtgagatgaaactccgtcgccatcacattttccaccggaataaaaataatattctgttcgtacttcgtcgcgatatgcctggcatcatgagcgtctttcatcgtttcaaacaaagcgccgaacagctcaaaagcgttgcggattgagtttttcgggcgctctttttcgttaggcgaaagcgaaattccgatgaccggccgcctgcgctctttggaaaacagccaaatcgggaaattgcttagcacgccgccgtcaacgaccgttgaggtgcctttatcagtcttcagtttaatcggctcaaaaaaataagggatgctgcagctcattctgacagctctggcaactgggaacatctccggatttaatccgtagcggggaaggtcgtcaggaagcacgatcatcgttccgttcgtcagatctgaagcgatcagacggagcgatccttttttcatatcgccgaacgcgatgatgcccttcgcttttaatttatccgcaatccatttttccagcgtatcgcctttgtataatccaaggcgccaatatatcgacacccactgcaggatattcagcgggaggaaggaatatctctgatcaagcaattgtcttccgtccacctcatctatgatggaatgaacctctctgctcgtgtagcccgcagcgataaatgcggcaataatcgcgccggcgcttgttccggcgagtctttcaaaacaatagcccttttcttcaagcgcttcatacgcgccggcaagcgccaccccttttatccccccgcccgaaaatacgccgtcaatctgcatacgcgccctctcccttccatccaaggtgtattattattttaagaaacggcttggtgaaatagaccaaagaatgaagacattaaaaaaagggcgccctatttcgggctgccctttattcaccgggattttcggtttttttctgtacggatttcaattcttttttccggctgtcgtcatcttcaaaatactgaacgagatcgccgatgcggtcaatgctgttccagctcagatgatgttcgattccttctacatcattgtaaatcttctcttcatcaacaccaatgattcttaaaaactgctcaagcaattcgtgtctgtatacgaggcgtttgccgatctttttgccttttgacgtcaatacgagcccgcgatatttttcataaatcaagtactcgtctttatctagtttttgaaccattttcgttacagaggagggatggactgccaaagcttccgcgatatcagaaacccgtgcatatcctttttcttctatcagcatataaatctgttcaatataatcttccatacttggtgttgtcatcgtacccctcccaaaaagcaccttaactttataaaccattacaagtttacactaacggtcatgaaaaaacaaggatgcttccggtctgtcaagccttaatcagcgcttataattccattcgtcagacgcgtatttcgtctcggccagctcattgacaaacgcaagctcttccggcgtgagtgtgtaaggctcaagatgaatgttcaggccttcctcaaaaccggctttaaaagcgattctggcttcatccatcgttaccggtttttgcgctaaggcgttgatggctaccgctttgtttttgaaattccgctgcatgcgctcacggactctgtcgctcggatataaaaacagatcaaacagcttgtcctcatcaatgtcaagcaggatggagccgtgctgaagaataacgcctttttggcgtgtctgcgcgcttcccgccactttccgcccttcgacgaccagctcataccacgaaggcgcatcaaagcagacggacgagcgcggatttttcaggctttctttttccttttccgtacgcggaatcgcaaagtaagcatcaagcccaaggtttctgaacccctgcagaatgccttctgaaatcacccggtatgcctctgtcaccgtggccggcatttccggatgatcctctgaaacgattacgctgtatgtcaattctttatcatgtagaacaccccgtccgcctgtcggtcttctgacaaacccgaggccgtgtttatgtactgcgtcaaagttaatttccttcttaatattttgaaaatacccgacagacagcgttgccggattccagccgtaaaaacggatcaccggaggaatttttttttggctgtgccaatataaaagcgcttcatccagcgccatgttaaatgccgggctttcattccctgagtcaataaaccgccatgtttctttttccatacactgaacccttctttatcgttttaataaaatcagtttaacaaactgacgtgaaaatgaaaaatatttcgtttcattaaggatgacaatcgcttcatgctttactataatagtatttgtcccaaaacgtccggtaagccttgttttcacaagcagggtttttgattttataagctaaaggagtagaatcgcattgtctaatatgattgctttaattattgttgcggcgtttatcgtttatatgatcgtgtcgtatttttaccagcagcgtttaatgaaaacacttacggaagaggaattccgcgcgggctacagaaaagcgcagctgattgacgtccgtgagccgaatgaatttgaaggcggccatattctcggcgcgcgtaacattccgctgtcacagctgaagcagcgcaaaagcgaaatccgtcctgataaacccgtttatctgtactgccaaaacaatgtccgcagcggacgcgcggcacagacgctccgcaaacacggctgcaaggatatttacaacctgaaaggcggatttaaaaaatggggcggaaaaattaaagcaaagaaccaataataaaaaagagctctccgttttatacggaagctctttttttatacccgtcagcggctgccggcagatgtatgttcgtattttaaaaccggctttcttgcggccttggtttcatccattcttttgacaaccgtggtatgcggcgcctcctgaacggtctcaggtgattcctccgcttcccgcgcaatttgaatcatggcatctataaaggcatcaagcgtttccttcgattccgtttccgtcggttcgatcatgatgctttcttccacattgagagggaaatacacagtcggcgggtgatagccgaaatctaaaagccgtttggcaatatcaagcgttcttacgccgagctttttctgtcttcttcccgataacacaaattcatgcttgcaatgacgggcatacggcagatcataataaggcgcgagtcttctcatcatataatttgcatttaaaaccgcgttttcggtcacagcttttaagccgtcaggccccatggagcggatatacgtgtaggctctgacattaatgccgaagtttccgtaataaggctttacgcgcccgatcgattgcggacggtcatagtcaaaagtcaaacggccctcttttttcgtgaggacgggtttcggcaggtacggaatgaattctttctttactccgaccgggcccgagcctggtcctcctccgccgtgcggcccggtaaatgttttatgcagattaagatgaacgacgtcaaatcccatatctcccggtcttgctttacttaaaacggcgtttaaattcgctccgtcataataaagctttccgccggcctgatggacgatatcagccatttctgtaatattttcctcaaataagccgagggtgttcggattcgtcagcatcagcgccgctgtttcttcatttaccgctcttttcaaatcttcaatgtcaaccagcccgtgttcatttgacttgacggtaatcgtttcaaagccggcgaccgtggcggatgccggattcgtcccgtgggcagaatcgggaacaatcaccttcgtccgtccgaagtctccccgtgcttcatgataagcgcggatcatcatcaggccggtccattcgccgtgagcgcccgccgcaggctgcagcgtcacctcgtccatacccgtaatttcctccaagtgtccgcttaaatcgtataaaagctcaagcgctccctgaaccgtgtcctcgtcctgaagcgggtgaatggctgaaaagcctgggaaccgggcaattttttcatttaatttcggattgtatttcatcgtacaggagccgagcggataaaaacctgaatcaaccccgtggtttctcttagaaagtgcggtataatgccgcataatatcaagctctgatacttccggaagctttgcgtcttcattgcggatataatcacccggaagaaggctttcaagctccgtttccggtacatcaagctccggaaggctgtaaccgacacgcccttcgcgggacatttcaaaaataagcgtctgatcttgattattcatgttgatcccccaatcccgcaataagcgaatcgatctcttcttttgttctcagctctgtgacggcaatgagcatatgctgcttcagttccggatacgctaggcctaaatcatatccgccgattatgccttgttgtaagagcctccggtttgcttccttgactggctcattcagcctgactgcaaactcattaaacatcgggccgtcaaacgctatgtgcaagccggctttttccgcttggcgtctcgcgtaatcagctttcagtatattttggcgggctatgtctttgacgccgttttttccgagcgccgtcatcgcaactgaagccgctaaagcgttcagcgcctggtttgagcaaatgttggaggtggctttgtctcttctgatatgctgttcgcgcgcctgaagggtgagaacaaagcctcttcggccgttttcatcctccgtttggccgacaagacggcccggcaccttcctcatcagttttttcgttactgcaaaatagccgcagtgcgggccgccgaacgccgcaggtatgccgaatggctgcgcgtccccgacgacgatgtcagctccgtatgccccgggcggtgtcaaaataccgagagcgagcgggtttgaagaaacaatcagctggctgtttcctttatgtgcgagcggctcaatgtcctttaacggctcaatttgtccgaagaagttcggatactggacgatcacggcggccgtttcatcgcaaacggcatcctctaatgcttcaaggtctgtgacgccgtttttcgcgggcacctctactacctcgatatattggccttttgcgtatgttttcaggacatcccgtgattccggatgaacggccgcggaaatgacgatttttttctttttcgtatggcccgacgcaagcatcgccgcttccgccaacgccgtccccccatcgtacatggaggagtttgcgatatccatccccgttaactcacagatcatcgtttgaaattcaaaaatcgcctgcagctctccttgtgaaatttcaggctggtaaggcgtatatgccgtgtaaaactctgaccgggaaatcacatggtcgacgataaccggctgatagtgatcgtacacacctgcgcccagaaaagatgcatatgtaacagcgtccttatttttcgctgcaagctttgtcagctctctcgtcagctctgtttctgattttgcttttttaatttggtagtctttttgaaacctcacatcttccgggatatcggcaaacagttcatcaattgtttctgcgccgatggctttcagcatttcttttttatcctgttctgtcgcgggcaaatatcgatgcttcatatgactctcctttttcagctctgttttggacgtttataaaacggtgtgcggacaatcttcgcttttaccgtttttttgcggatttccacttctacttccgttccgatttcactgaattccgttttgattaaggcaaggccgatatttttctttaaagtcggagattgtgtgcctgtcgtgacttcaccgattgcaacaccgtctttttttacggcgtatccgtgtctcggaatccctttttcaatcatctcaagcccgaccagcttacgcggagctcctttttctttctgttcactcaatacagacttcccaaaaaaatcggaatctttcttgtgctttacggcaaatccgattccggcttcgatcggcgtaatgtctttcgtcaattcctgaccgtataaagcgagcttcgcttcaaatctcagcgtatcacgggcgccgagaccgcacggaacgagcccttcattctctcccgctgcaagaatctctttaaaaagatgaaccgcgtctccgttgcggcaataaagctcaaacccgtcttcaccggtatatcccgttcttgaaagcaggacttggcgtccggcaacgtccgcctcatcaataaacgtaaacggctttaaggaagccaaatcacattcagtcagcttcgaaagaaccgtctgagcattcggtccctgaacggcaagcagtgaaatctcgtcagactgattcgttaatgtgacatccccttttgcatgttccttcagccaagcgaggtctttttcaatattagacgcattgattacgagcagatagcaggtttcgcttttctgatagatcagcaagtcatcgaccgtgcctccgtcgggataacacatggcggtataaagcgcgcttttcggctttaagtcggcaacgtcatttgtcatcattttttgcagaaaagacagggcgtcttgcccggatacttcgacttctcccatatgggacacatcaaacaggcccgcttttgtgcggacggcttcatgctcctctttaatagaagaaaattgaacaggcagctcccatcctccaaaatcaatcgtttttccgccgtattctttatatacgtcataaagcggtgttcgtttcagcatcatcttcccccttcagtcattggcgcattgtaaagacatataaaaaaggacagagaaacacctcatgaaaatgaaggtttctctgtcccggcacctgaaagtttactttatgaaaacatcataaagacgtcccctttggtggtctgccttttctgctcgcagacactctccagagttgcgtcgagcaagagttcttttgcctgagagattcactccgcagtttgctccttcggcgcccggatgcacatctttcttccgagtctctccccttgctgtcattcgctcatatttaccaattgttatggacatactaaagcaatatcttgggtgaaatcattacttatatcctaccaccctcacttacgtccggcaacaaaaattatgataaatcagttttttaaaagaaaggcggttttgttacatatgacagcagagatcatatttgatgcaaactggccgggagagttttctgagcggctgaaaacggacggtccctggtcaaattgggagttgtacaaactgtcggctgaagtccagcagactcttgccattcctgaatttgaagggttgagggctcctttatacctgcccgatttcactccgcttccccatcagcttgaagttgcccagaaagtcgttgaaaaaatgaacggcaaggcgattttggctgatgaagtggggctcggaaaaacggtggaagcgggcctgattttaaaagaatacatgattcgcgggctggcaaaaaaaatcctgattcttgtgccggcatcactcgtttcccaatgggtgaaagagcttcaggagaagtttttaataccggctgttgaacagaagaaaagctatgtgtgggaacagtgcgatatcgtcgtttcttcgattgatacggccaaacgctcgcctcacaaggaaattgtgctttctattccgtatgatctcgtcattattgacgaggcgcacaagctcaaaaacagcaaaacgaaaaattatgaatttgcgagaagtcttgtgaagaagtactgcctgcttctgacggcaaccccgatccaaaaccggatcgaagaaatttttaatttagtgtcactgttaaagcccggccacttgggaaatgaaagcggatttcaagaaaccttcaatcaaaaggacggaattgacgctcatgagcatttgaaagagctcgtcaataaggtgatgatccgaaacacacggagcgacacggggcttacatggacgaagcgccacgtcgaaacagtgccgatcaccttttcaccgacggaacaggcgctttacgatgacattgccgcactgaaaaacggcacggaaaagccgacaagcgcattttccattatgacgctgcaaagagagtgctgttcaagccgggaagccgtgtatatgacgcttaaaaaaatgcttgatcaaaaggagcaaaaagcgcccgcattcgatgaacagacgattgcgaatttaatggaccgcatcaatcaagtcacgcaaaactcaaaagcgatccaagtggttgacttgatccaaaagattaatgacaaggtcattatttttactgagtaccgggcgacacagatttacctgcaatggtttcttcagcagaacggcataagctctgttccgttcagaggcggatttaagcgtgggaaaaaagactggatgaaggatctcttccgggggaaagtgcaagtgctgatcgctacggaagccggcggcgaagggatcaacctgcaattctgtaatcatattatcaactatgatctcccgtggaacccgatgcggcttgaacaaagaatcggaaggatacacagactcggtcaggaaagagatgtccacatttacaacatggcgacaaaacatacggtagaagagcatatcttaaaacttctgtatgacaaaattcatttattcgaaaatgtcgtcggagaattagatgacatattaacaaaaatcaaagtgaacaattttgaagaccacttacatgatattttatgccactcgctgacagaggaagaaatgcgaatcaaaatggacaatcttacctcttttctatcgtacggtacggaaaagccggccagaaaaaaaggctcttaatctaaaggaggaagcgcgacatgagacagcaggaggttcacgaatttttactgcgcttttttgaagcgaaccactgcccgattactgatcacgggccgggttttatgacggttcaattgacggtcgagatggacaaacaaattatgaaccggccgttttattggcattggcgtgaaaaaacgggcggagaaccgaacccgatgaagatcactttcatcactgataaagaaacggctccggatgatatggacggagaatttatttacttcggagccccgcggctctttcaaatctttcaagcagttaaacaaaatgggagatttacaagaatatatgagaaaattgtatcagccggagccagagtgccgcttcagccctggcttggattaaatgtagtgatttcataccaatccgacatgaaaaaagacagacttttgtctttaggcctgcatcttgtatctggaacaattatagaaggatttcagcagaagcttgcaccgcttccgctgacatcacaaatatcagactattgctttaccatatcgccgatgattaagccggaaagcgggattaagaggatggagcattatttgaaaaacgctgccgccaaagagccgtcagactgggctgacaacgcgatcgccagatggaagaaggacctcaggcttctcgatcagttttatgagcagacagaggaaaaacctgaggaataccaattggaaaaacaagcgctgaaagccttatatcagccgaaaattcacattcagattgagaacggcggtttatttttcctgcaaagtaatttttctggataagagttatccattcgacagctttcccgttttttttagaaattctatattataataaaggtatatagaaaaaatttctggcgtttcgcatgcgatgaatcacttccagacatgaaataaagataaggtcatggccggattggctgaaatacataaacaagtattttaggaggagaaaatgcatgaaaaatgcaaaaacagagttttcgcaattagataaggaatgggttgaactgatattagaagcccaaaaagcaaatatcagcctagaagagatacgcaaatacctgcattcgcataaaaagtcttctcaacatatccaggccgccagaagtcataccgtaaatcctttctgaatgtgctataatatcacaaggaaggtgatgacattgattggccagcgtattaaacaataccgaaaagaaaaaggctactcactatcagaactagctgaaaaagctggggtagcgaagtcttatttaagctcaatagaacgaaatttacagacgaacccctccattcaatttctagaaaaagtctccgctgttctggacgtctcggttcatacattacttgatgaaaaacatgaaaccgaatacgatggtcaattagatagtgaatgggagaaattagttcgcgatgcgatgacatccggggtatcaaaaaaacaatttcgtgaatttttagaatatcaaaaatggagaaaagcgcaaaaagaggagtagtgccgccatatgtgcacaactcctcttttatctgtccggcattcggatcagtttttatcctcactatgagccttttcattttccttcacgtaaccgtctttatccgtatggtctttcgtaatggtcaatccgttccattgcgttgcttcaaatgagaattgaagagaaatcgcattgccctggaatttgttttggacactcagaccgtttgcgtcttttgcggtatcatttttaaatcggatttccatccgcacttgatcataatcaacaggcgttttcggaactccgtcgtactcaggcgctgttttgccgttaatggttgctacattgacttttccgctctcactcaagaacttcggatcaatatgcttgctgatcgcttcagccgctgctttatcctgctttgcagacattaagtataagtctttcaggctggccgccttcaaaatgatatttttagggtagccgttgcccccttctttaccgactgtcagaaccgtaatttcaaactggctgaggaaatcctccgcagattcgtttcctttctttgctcctttgaagtcagtaaagttcaaagccatcagcacttctttaatggcaagtgaaccgttgtttctgaattcaaaatcttttgtcaatttgtcgcctggttttaagtttgacaaattgacattggctgattgttctttagccgataaatcaagtgttcctgacgcaaatgtggcgtccgtggacttcacatcattaaatgcggcccatgtgcctcctcctactaatgctaaaccgagtgcggctgaggcaacgcccaagcttaatttctttttcatacccatgtttgtactccccttactttttcattttttgttatcaaatcctgtcgccaggttgcaaccgtattcatgtggacatggtcccgtttctctcatgttcctccagcgctttcgtcttccgctcgatatcgcggagagcgcttgcaatgactgttattgagtaaattaaaagcatgacgccgggaacgattaacagaatcgccgttccgatcggctggctggccaaatgtattacatatcccgcatacgggagctgatatcccgtatactgggccgccactttttcagcttgaacgggtgcggcatccggagcggcattatggtctccttttgtctcaaacaacaggcggccgcccttttttgtgatcccgattattctgtgtgttacgactgacccgtcatcttgtgtaaaagtgatgacatcgcctttttttaagtcattcacatcagaaattttctttaccgctatgagtgaacccgtcttaaattccgggtccattgaacccgacagcacggatttcagcgtatagccgaagatggccggctcaccgccggaagcccgggtcgagattaccgtcaatgtcagcacaataatcaagctgaagattacggcatacaaaatattactgatcagtttcagtgtttttttcatgttcttccccgctttcttttgccggctcagccggttttttctctgttttcttctgatcggaagccgtcgcctgttcttggcacttaacaagcttcatcggttttgaccactcaaatttttcttcgttcgcaggatatccttcaggcttgtaaaccttgaatgcataaattcccggctgcaaggcccgctttgactccattttataaatcgttttgctttttttatcagtaataagccctttatccacgacattgccgttttgtaaaggctgttgctgagaggcaattttatggagctcccatttccagtcagaaacagtccgctctttccccctgttctccagctccgcataaagttgaagcggcgcacacacggtgcctgacgtatcagtttgatttgtgatatgtaaatcactttgatcccagcgttcgtcataacggcaattgtcatctgtatatcgaaaatctccgcacgtttgaaccgggagactgaagcttttcacatcattaaaggaggaacttgtgtctcccgtaaactgagtacatatcgtcacgggcaggcagaaaatgaacgacagccgtaaaaacagcatcattctcgatctcaccttgccctttttttccggtcgcaacaatcggaacatgccttaccccctgtaaaactgtttataaatatgatattcgttctctttaaagaaccgcatgaacaaagtataatcaaggattatcgtattggaaaatgtcaaaaacgatcaaattgttcgtttttaagaatatatcctttaaaaacaacgttttgctccaaattacacacctttttggaattttttctaataaaatgtgagaaaataacggagtgaccaacacaaaatggaaactatatacagcgaaaggacgaagaatgatgatcaaacaaagtctgatttgcctttcaattcttggtttcggagtttcagggacagctcaggcggaaacggtgccttattatgctgttcaccataaatcaaaatgggaaaaaatcgcagaaaaagaagctaaaaaaagatatccgctcgctcaaacgttatttattcaaaaggtgtgggatcggaaaagaacggatgaagcagtcaaacaatatcacttgacattgcgggatggcgctaaagaatttggtgtgtttgttacgatttcttttaatccctacagccaaaaggtaaataaaattgcggttattgaggaataccaataaaggccctcctatatcaggaggacctttcgggtgttgcactttattttttccgctgcatccacagcttaaaaccatacggcaatattccgaaccagtgttgagaagccggcattttcttttctttccgcacttcttttcgctcttttcgttcctgtttcggcgtatcgaaatatttaacgaattgctcagtcatatattttacataatcgtttgttttcatggctctcacctcatactgtctttattatgaagtgttgtcccgccgcctcttttttatacttctgtccattgaatcagctgtttcttcttatgattgaataaaaggtgagcctcccgtctcgtccctgatgctgttaccgcctttattgtaacttgaaccgtttcccggcgatcgttcccgttgatgtaaaaggagacggttccgtacggaaaacgctgtgtgcccgactgagtcttttgtccctgtatcatatgacggcttgacagcagtgcgccgttttgaagcaggttctcaccgatccagtactccccggcctcttttgcaaatgtttttcgggtgatgaaatcagatgaagtatagctgatgacaagtaaaactgcggcagaaacaaacagaaccgccggatatataaacccgtcagatttgtacattttaatcaccttttaaagagctgtaaaccggaatggccgtctgcttctttttacctgtaacgcttgtgattcccactaaaatcaggccgtttttcacatcagccgttaatgaagcagcgttatgcaggatcggcacatggccttttccgttcactcttttccttatcatcgtgtgatagatttcaaaacgcacttcttcgcctcctgttttcctgcaggttaacgcccgtccgccatctgcaggctccacagtctcagcctgtttacattcattcataatctgctgaacggcaatatgatgctcccggctgtctattcctccgttatcggtccggcctgataaaaacaaatgtaaaatcgggctcagagtgcctgataagaagagacagacggccaaggagaccaaaacattaagaagcgtaaagccagtctgttttgagaatgctgaggcacatttctttttcgccgcggacagctgcacagactttgtaataatcaccatcctccttccacgtcacatcgggagatggctgcttttttccggacatcatatatgcgctgatatgtttatgaagaagctggtacacttcctggtgttcttctattttcagattgtctgtcagcatgcccgtccagaccggaacgatagaaatcataaggaacagccaaatagccattgctgatagtgtttcaatagtagagaaccccttatttccgttctgcatggacatttccgctccctaagtaaattgttatttcataagtgaatcccgcgcttttcaattgaatctttccgccggaattcggatggcctttttcgttaaattcaaggctctccggtaaagtcacaagtgtaatgtgaagcgaatcaaaggaacgctcaacaatccttccggctgactgcagcttgtatttatgctcttttgggagaaatgtgatttttgttcttttatgttctgcgatagccgtttcctgagcaagctgaatgtctttttggagctgttctgttttttgccgcacggccagatgggtataaaccggcggaaccgccgtgaacaaaacagtcagcaatacagacgccagacttaacacaaccaggctttcaagaagagtgaatccgttttctgtcagccggttattgttcaactgtaacttccccgccctttattaaaatctgttttccattcgggcaggctgtattctttttgatatatccctctgattgtaagtcggtcatatccggcatttttccttcatggtcgatttcgtacgccgtcacttgggctttcaccatattctgaagtccttcacagcctttatgctgaatgctttgattatgttttgttacgttaggaatcgtgattaaaagcagaatggaaacgataaataaaacgatcagcatttcaattaaagtaaatccatcttgatttttcagacgaagcactcccttacatttggttcatcatctggtacatcggcatcagcattgacatatacacaagtaaaatcataccggccacaacaccgtaaatgacaggctggagaataccggtatacttctccgcattttgttcaagacgctccatcataaactggctgtacgtataaagttcgcgatgaagccggccgtttgcctgtccgtgactgactgcagccgcaagatctttttcataacacggatggccggaaagagcagattctatagtttcaccggccttcaaacgtgtaatgagcatctctgcttcttcacggtaaaaaggcagaaaagattgttctttaaaagcagttaagctgtcatagatagaaagaccggatttcagaagactgctgagctgtaaagagaaaaagtagctgttaaaaagaacggccgcttttcctatcagggggattttcacaacgataagcatcttgtcttgcggggattttttcttacataagaaccaaacgtacaaaaacaagctgagaacggctgacatccccagtgcgcaggcttcatgaaaatgctgaaaaaacgcaaagatgaaagcagtcgcaccggaagtattcatattcattgattgataaatccctgaaaactgcggaataatcaaactttgcaggatataaaacatgacgcagacggaacatattaaaaacatcggataccggagcatttttttgatttgattcgtctgcatgagctttctctgtaacaattcgccgctttgtttcatcgcccccggcaattctccgtgtttctccgcgaaatagcagatcgagacggcttctttatgaaaagacagtgcctcaagcacttggtaaaacgaatcgccttctctcagccggcgaattccgtccgtcagctctgcaagctgacgtttatgcagctggagtttcagcagtctgagcccttcaatcaggctgtatcctttttccgtcatttcaccgagccttttcaaaaaagccgcttggtccttcaacggccaggttcttttaatccgcttcatgatacacccaccgatcataattatcagtcgtgacataaccgagcgcgatgccttttctgatcagcctgcgaagcgtctgatattgaaaattggcgtgctccccttttgcttcttgaaagcactgggtgagattttttccgtaaagcagttcataaatcccagcacggcgtgtctgcctgtatagactgcagtacacggaacagttgtccgttttgcaaaacggacacgttaaatcaaccagacgctgagcggcgatggcaataacggtttgttcaatttccgtcatgttcaccccgaactccagcagcctgtatatggcgcccttagcatctcttgtatgcaggcttgacagtacgaggtgtcctgtcatggccgcgcggactgcgatttcagccgtctcggcatctctgatttcccctaagatgatcatatcggggtcatgtcttaaaatcgcttttaaaccggtggaatatgtgactccggctttttcattcacctgaacttgcaaaacatcttcatctctcgtttctacgggatcttccagcgtgacaatccgccggttgaaatgccgttttgcatagttgacaagcgagtaaagggtggttgtttttccagatccggtcgggccggtaaaaagaagcaggccgtgcgaatgcttcagaaaggataataatgcggcgcctgcccccggaaataaggacagtttatccagagggggaatctgccttttaggcaatagcctgatgacaagactttcatcattcattgtcggcaaggttgacatcctcaaatgaacggtttccgttggaagcggcagagacagtgatccgttttgcggctttcgtctttctcctatatccatggctgataaaaatttaaaatgagaaataagccttacgcattcctctttttttaagactctttttttcacaagagcatgaccgatgcgaaaatgaatgaaagcatccctttccctcggcacaatgtgtatatctgaagcccttgccatataggcctcgttgatgatgttcctgctgtatgtttcaatattctccataagacttccctccttccgacacgtattgtaaatcaaatacacaaaagtgatcaaaggagaaataatgctttttgcacagtgtaaatcgtaaaaaaagcaaaaataagccgcttaaatattgatttactgaaggaaacccggctccattcagcaattttcggccataaaaaaagcaggcgtgcgcctgctctgcttagcgtttcttttctttccgcagatatttcttttgattctccttcagaatatcccctgtccagcccttctgccgcagataaatataaatcagcagggttgatacgattataagcacaatggaaccgatatacgcatatttccaatgaagctccggcatgttatcaaagttcatcccccagagagctccgagcgccgtcatcggtgtaaagagagttgtaaagatcgtcaatgctttcacaatttcatttcctctttgggaggtaatgacttcctctgcgtgcagcagattgctcagttcctgatcaaattcattgatatatgtaatgcctctttccatcttttgatgagccctgaggtaatctttctgcttgtcatttttcgggagaaaagcttcttttaaagccatttccacttttttagctcccagcgtcagccctttccaaatgaacagttcatggcgcagtttatgcacattttccaagattcctttactgttgtcatcatgaatctgccatttcagcgtccgctgcttgacttcaaattcatctaatccgataagataggaattcatcagctcgccgagcagaacaaaaaagccttctatcgcattctcgcatgtttggatctgctgtgtggcgtgcttttcttttatgccgcgcagcagcgaaaaatcaaaattaatcgtaaaaaagaagtctctcgtaatataaaagtgaaatacggtatgatttttttcatcatctaatccttgatgatagattaaagaaccgaaaaccgcttcattattctgatcatttgtatctgagcgcagaaagtttatatggttttcatgttcaaaccacttttcacattgcggccagtgattgtggcggatcatttttttcgcttctgttttttcatgcggaccgagctggtaccaaacccagtccgctcccgaatgtaccttcatctcttgtcagcctccagtatcgctttcttcttttaattaccgtaattgcagcgggctaaaccaggtttgatgtttgaccagctttccagagtggtattattccgaaaaaagggaggtgcaagccttccttctcggaaggcgttccattgtatatcatcaaactgtctgccatcgtactatttattttattaacggcatgttttgtcgctatagagttttcaatcgttaaagcaaggcgctcccgcatcaatcagctcattcaggaagagatgaaaggggcaaaagctgccaagcatgtcattacacaccttgatgaatatttatcggcgtgccaattgggtatcaccgtaaccgccttgggactcggctggctgggtgaaccgacagtcaaagcaatgcttcagccgttatttttaaaaaccggacttcatgaagcggttgcccatgtcctgtcactcatcattgcatttctgctggttacatatgtgaatgtcgtcatcggtgaactcgcaccgaaaagttttgctatccaaaaagctgagcggattacacttttgtttgccagaccgatgattttgttttataagttaatgtttccgttcatctggctgcttaatcattccgcacgcctgattacagccctgttcggcttgaagccggcttccgaacatgaaatggcctatacggaagaggaattgcgggtgctcctggccgaaagctatcgaagcggcatgatcaaaaaaagcgagcttcattacgtaaataacattttcacatttgataagcgcactgcaaaagaaatcatggtgccccggaatgaaatggtgagcctgccgctggacagcggatcgggaaatatgctccgggatattatcaaaacaaataaatatacccggtatcccgtagtaaagggagacaaagatcatgttgtcggcattatcaatataaaagaagttttattcagattcctatcagaaggagctccgtttacaaaacacgagctcagtccttacattcagccggcgatccatgtgattgagacgatcccgatttatcaattgttcgttaaaatgcagcgggaacatgctcatatggccattctcattgatgagtacggcggaaccgcaggattggtaacggcggaagacatcatcgaagagatcgtcggcgagatccgggacgaatttgacacggatgagacaccctccgttcaaaagcttggggacagccgctatctcctaaacgccaaattgctgatcagtgacgtcaatgatgtactcggaacagagattacggctgatcaagtcgatacactcgggggctggtttctgactcagcatattgatgcaaagccagggagcgtgattgattttgaaggatacacattcacggtaaaagaaatcgacagccatcatatcaggacgattgaagctgaaaaagctgaatagctgagggagaaatccctctctgccattcagctttttatcatcttaatgattcttttacgacaaatccgtttttcgccagcgccttcgtcaggctctgttctgttttcacttgagaaaagtcgatgccgagcttcacgacggtttgcgcgatttccggccggatgcctgagattgtcgtttctatgccaagaagttttgtgctgtcaatcactttaaaaatttgataagcgaccattgtgtctacaatcggcacacctgagatatctaaaaataaataggaaagccggagcgaagaacattggtcaagcaccgattccaaaatgatctttgccctgtatgtgtcaatttcgccgacaagcggcataatcccaataccgtcggcaatcggcataatcggcgcgcttaattcattaatcatttctttttgggcgtttaattgcctaatcgtcactttataatattcctctgtaaagacttcaatcatatggtcaattgctttgttcagcttctctccccattgaaataccgcaggcgtcccgggcttctcggacatcgtttcactgcatgtctgtatgcgattccagaccaatctccggaattctttaaagcgcgcgacgctttcatagaccgggacttcatgcacggcccggtctcttgcgaactgcagcgcccactttgtcagttcctcgtccccaccgtctttttccgatataatcctggcaacgatttcaattaacaggcggtgctgcgtttctgctctctgatcatctgaaggccgccccgattcgggtatgagcagccattggcgtgtgatttcacctgattcttcaattaatgcttcagataacacttcatttaaatgtttcacgggtttcctccattcaaatcaaaattactttgtatgtataaattgccgccggacgcacatactgtaattacatccgatgggctatagccaagcggtaaggcaatggactttgactccgtgatcgttggttcgaatccagctagcccagtcctgtaaccgcaaaaaacgaagattagctgataatgtttgatcagcggatcttcgtttttctcttatgatacggattgatgtaccgtttttttcttcgtcagtttcattaattctccgggattatatccgataacgagttttttgtgatcgatcaggatcggacgccgcagcagcttcggtttttcagtcagaagcttcagcacttcatttccagtcatttcttcaagattcaggttgaggtttttaaatgtttggcttctcgtcgctaatatttcatcaattccttcggtcgttaaggataagatttgcttcaattcatcaattgtcggtgtctccctgaataaatggcgctcatgaaaatcaatgttgtgggcttttaaccaatgtttcgtctttcggcatgatgtgcagctcgggtatgaataaaaaataagttctttcatttttaaaaattcctccctcggataatccgtctctttgtaaacataagtaccctgaactttttttcactaaacgtatttcaaaaaaattttcggatcttttgttcagagcggcataagatataaaacacggggaaagacataaattccacaataaatataatcatgaaaatgtttacatttcgactgccgatccattataattaacttcagatagactctcgggaggggataaggaatgaatcgcatgttccgggtgttaggattttggacggggatttttgcagtaatgttttttttaggcggcatgaaggacgcatctcttttgttttttggacagacgatctttttcgtatttctttcttatttgaatctgactgagcggatgtatatttatattttcggagcttacttaaccgtatttttcgccggatttacatattactctatttttattatgacaccgggcggcggaacccactgactaaaaaagacagaccgattacggtctgtcttttttcatttacagtgaaaaaccattgataaacgggtttctttcctgctctgtctggatgtccgtttccgggccgtgcccgcttaacacaagtgtatgcccgggcagtgtgagcaatttttgatggatggaatcaagcaatacgtcctgacttcctccatgtaaatccgtgcggccgatgcccccctgaaaaagcacatcgcctgaaatcacaagatcggcgtcctttacataataagaaacgcttccaggtgaatgacccggcgtaaacagcgtctccaaatggaacggtccgatgtccaaaacgccgtcgccttcaatcagccgatcagcgggccgtgccgtgacggcgatgccccgcaatatgcctgatccgtttaaggaagagtcctccagccacttttcttcatttttgtgaagatacacgggaacatcccatctgtctcttacctcatcaagcgcgccgatatggtcaaaatgggcgtgcgtcagcaagacggcaagcggcttcagattgttttcttttatgtaattgttgattttgtccgcttccccgcccggatcaaaaataagacaggactgatcctcactgacgagaaaatacgcgtttgcctgaatcggaccggccggcattcgtctccatttcactttcatcacctctttatgtatatgcccttattatgaaggttttctgcggaagattcaatgaatgcggccgggaaaacgctatcgacaaataaaatgaaaacggttaaaatgaaatggaaagattttcaggttccaatgacaaagggggagcatgatgttacttgttgtaatcttcggccttgtcgcattattagctgtattaggagtcctgcgggctgtcagacagagaaatatcctgggatttttgttagccgccgccacgctcggcgtgtttggctggtttaccgtaatgaccgttataaccagcggctatccgactgcacattaaaagcctgtatccattaggatacaggcttattttttattgctgcaaatgtttgctgacacttttgattttgctctcaagcgtcgtttctttatcacgtctgtcatcaatgcggatattggtcgccactctgtgcagccctttatggaacggggcttcgtgaatgtcctgaatgactgcaaacaagtcgctcagctcaccttcaatcaaagtgttcatcggtgtgagctgaaatttgattttgccggcagctttgtagccctccaaaatcttttgcacgtccgctacatactcgctgacgctcggtgtttttgttccgatcgggataattgtcacatctgcaattgccatttgattcaaactcctttttcatttgttatgattggttctgtcatacctgttttcagtgaaatcagacggtcatacgtaaagccgtataaagcgtattccccgtccggtgagatctgaatcggctccatttccgtattcgtgagcaccgtccgctcccgttcgtcccctaagtcaaagctgatcagcctgtataaacggccctccggcttaaatatgtaaaaccgcttgtgcgtctgatcgtaatcatattccatcggcgcaaagctctcatactttttttgaagaggaaagcggtgtgtcacggatgccggtttttggaaaaaaaactcgccgtcgccgtccgattgatcagtttgtctgacggcaatcgtcatacccgggcgggaatcggcccagatgacgtgatgaagcactcttttttcttttttcgtctgcaagtcataagaatataaaggaccctcttcttccgttttcccttgcttgatatattgaaattcatcagaagacgtccaatggacaaaaggtgtctgaaccggactcatgtttaaaatgccgtttttcatatcggccgtataggttgtgaagtcccatgtttcagtaaaaacggtaatcatcatttgatacgggtcatacggattccaagccgtctccagctcataagagttaaaggctttgtgataaagtcttttcccctccttgttcataagctcaagctccgtctgcccgctgtttgtcacctgaacgagaatcagctgttttttcgggctgatctttacattgacaatatggccccttgtttcatagagccgttcggattttccgctgaaaagatcatatttcatcagctgatgatgcgctgtatacagaatggttctgttatccagccatccttccgctttctccgcttcatttttactgagcggaacgattttctgttctgctgattttgccgaaacgcctgtgtcatgctgctgatgagatggttcacaggccgctaaacacagaacgaatgcggacagcagaacacaaaacaagtatctcaccagccttccccccattcttttctattgtcccatatttgtttatgtaaacaaatgagaaatttcacagatgtctcaaaaaacgagcgacctccacaaaatgccttccgtcgcttgataaatatcagcaaactgatgaaaaggcaaagggttttttccctttccaagttcaacggtatagccctcttttccgtattgctgtataaaccaatccctaaaaccggcatggctgtcaatggtttttacaccttgatagcggtttccgcttatctcttcaaactcccggatgacctgagcggattgttccggttcatatccttcatatccccaataaatctcttgtccctgcgtatgaagagcgatcaccctgtcaggcggctgttcggttatcagccggtgcatcgcctgcgcttccggttcagtgagcggcgccatgcccggaaaatcccggtacgaaggggctttcggtttgcgcctctgttcaatgtcccaattggacgggaaatgtttatttaaatcaacgccgtttatattcgccttccattcgcggaaatccgggcggtactcatttaattcattgagaaattcacttttttctgataaatcttcacatccgtaaaggacgagatcaacaccgtcgggatttacgagcggaacgaatgacagtgatgtccggctgaatatatcaagcgcggaatacccaaaaaccgtcttatttttgcataacgccgcgcaatattctttacaccattttagcgcaaccgaggtggtgatccattcattggcatgaaaagaggcgtttacatgcacttttctttcggctgtatcctcacctattgtcagctcataaagcggttttcccaacacggaactgccgattttacggcacatgacaaatggaaagacatccgttattttctcaatttcttcaaaaaccgattgagcgccgtacactttttcttccttcacccattgatcactggaaagaacgcttttacagcgccggatgtattgcgaaagcccgctcagcgtcccgatcggaccctctgactgcccgctcacgacaaagccgggacaaaataattcctcgcttttcgccgttttattggcgtctttcaacagtttttcatcaattgaaagcacctttgcgacagctttcatatgctgtttcatttcaggtgtgacacgaattcccgccatgttcatccccctttttaaaaaactatatgacatgggaggtaaaaaaagaaagccgcccgctatatgggcaggcagactttctctagcagttttgatatttaagccattcatttttggcaatccacgccccgccgatgactccggcgtcatttccaagtgccgcaatcgaaatatcggccgcttccgcagaacgcgggaacgcggtgattttgaaggtctcttccacttttgaccgcagtatttctcctgctttcgagacgcctccgccgagcacgattttagtcgggttcatggcgcttgccaggtttccgagcacaaggcctaaatgttttgcgacataatcgacgacttccagcgctgtcttatcctgctgttttgccgcttcgaacacgtcacgtgccgtgagatcgcgcacttgcaggagcgaagagtcggaaaccgctgcaagcttttctttcgcgatgcggacgatgccggttgctgacgcaatcgtttcaatacagccggattttccgcagttgcacggagccccgccttccgggatactgcaaatatgaccgatttctccgcctgccccgtttttaccgtgaacgatttctccgttgacgatgatgcccccgccgactccggttccaagcgtcactaaaatgacatctttagctccgtcgcctgcacctttccacatttctccgagcgccgcgatattggcatcgttttcaatgacggccggaatacccgtttccgcctcgagatggtctttcaagggatagtttttccaccccagatttgtcgtctcataaaccatccccgtcgccatttccacgggtccgggcgctcccatgccgatccattttacgatccgtttcggcttattcaattcttcgagtttctggtcaagtgctttagcgatcgtgaccgtaattgtgtttcctgatttatcggtcggaacctcccatttgtgctgaatttcaccgtacatgttgataaaggccagcttgatggttgttccgccaagatcaatccccgcaaaccatgtctcttccataatgatctccttttcttattaaatcctgctgttggaccttcctttaatccgctctgattcctgttgaagaactccggcggctttcagccataattctctttcaatcacgtttgacaagtacatctcctttaattcatctttcataaagtcaatttcggcttgtctgtcaccgaaataaacgatatggccgaatgacttaaacagctgctgcacgtcataaaatgaattcatcttcttcaccatttctactcttcttatgagtataagcgtatttcatctctgaagcgggagtcaagcaaaaaacgattggagaaaatatcctagcggcattttgataaaatgtatattcataattgtaaaaaaactctcatttatgcgtttttctgttacaatactttcgtgcccaaaagcacaaaaggattaaagtttgatggggtgttgttttgaaacaagaaaaaaggctgacgttcatctcagccatcagtttatttgtcttgatgttagcagtcattatttcctgcctgtttttctttcatacggaaccgcatatgccactgtttttttgcgtcattattctggctctggcaggtttgtggctcggtttctcgtgggacagtcttgaaaaaggaattgtcaacggtttgaaaaacggagtacagccgattatcgtgctggctttgatcggtgtgctgatcggcgcctggatgtacagcggtgccattcccgccgtcaccgtttacgctttatcgattatacagccgagccagcttcttttgaccgcattattttcctgcatgatcatcagcacgcttgtcggctcaagtctgacaactgtcagtacaatcggcgtcgcgctgttaggggtagcaagcgcggcgggtgttccgctcgaatggacggcgggagcagtcatttgcggggcttgtttcggtgataaaatgtcaccgatgtccgacacgacgaattttgccgccggaatcggcgaaattccgatttttaaacatatccgccatatgatgggcacgaccgttccggcactgctgattacaatcgttctcttttatattctcggttcatccgtttcaataaatgccgcttcaacgcaaaatattgaggcggtcatttccggaattaaacaggccgtacacgttacgccttggtcgcttctttcacctctgttggtaatcattctggcggtcagacgggtttccgttattccggtgcttaccgccgggattatttccgcagggattctgacggcttttttcattcctggcagcagcgttcaaggatttatttctgccctgcaaagcggcacggcatttaaaaccggcgatgaggctgtagccagcattatcaacagaggcgggctccaatccatgatgggttccgtctctctgatcatgattgcctttgcgctcggcggcctgatggaaaaaacaggactgatcgcagcgctgcttcaaggattgataaaaggtgtgcatacgaaaggacgtcttgtcttggcgaccgtcttctcaagcataggcgtaaatctcgcgacaggcgagcagtacttgtcaattttaattcctggtcagtcctataaacctttatatgacaggctcagcattaagcggattcaccttgcgcggtcgctggaggacggcggaacattgatcaatccgctgattccatggggagtaagcggcgcttttatggcaagcgcattaggggttcccgtcatcgactacctgccgtttacctttttcctgtacatttctccgatgatctcaatcctgcttggtttcctgaaaaaaaactgacaatccgaagacacctgccgtctttttcccggcaggttttttcatgcaaaaaatcccgctgaagaaacgggatttgtttaaaatgcctgctgaatgaacttatttctgataaacggtatttttaaaaagaaatgaataaacgaccgtctgatccccggctggctgagcacgctgttcatcagacggtagcggttttggtaaacggctaaaacagatacggcgcatagtgagtagatcaacaattttttcatcttatccctcctgcccctatcgtttgtcaaacagcgaaaattattccggtgcaagacgttttttatgcgattaagcgatgatttcagattcagtcacgatcgtatcgaccggaatatcgtggggcatgcggggaatgcggtccgtcagctggcagtcaaagagaagcgacacggtacggccggcatagccggtcaggaacctgtcataatatcctccgccgtatccgattctgaagccttcccggtcaaaagctacacctggcacaagtacaagatcaatgtctttttgggccactttttccgtcaggctttcgatcggttcactaaggccagcatatacggtttccagttgatcatccccagaaaatgtacggaactccattgcgcccgttttcgggaagcatttcgggatacagacttgttttccctctttccaagcttgttcaataatcggccgtgtcgggatttccaagcgtttcgagacggtaacggcgatcatgcgggcttgtttccattcctttaaagaaaacagcgtttcacgcatgctgcggcattttgcctcccattcactttctgttatagcagaaagctttgcttttatatcggttctgatttgtgctttcacgttcctcaaacctccctgaaagacaaaaaagccagaactttattgaaagctccagcttttttccgccgttttaaacagcttattttgtttcacggtgtaacgtagattttttatcacgtgggcaatattttttaaattcaacgcggtccggattgttgcgtttgttctttttagaaatatagttacgctcaccacattcagtgcaagccaaagtaatattaacgcgcattattttccctccaaactaaatatcatttacttattcagacttatatataataccactataatggacggaatgctagagctgatttacatgaaatgttgtttaagtgcagaaaacatcagtttatgcttctgatcgcctgaatgagcttgcgcaagacagatacaaaatatgacgaaacaggacaaaaaaggacattctcatgcgaaatctatagagaaatatccgtttgctccccgaataaacaagatttcccgacaaaattccgtttttttctctatttcctttagaatggcggcgttttatggtataaaaaagaagggcaaattaataatagaaggtgatgaaacgtggaaattgctattattgcgttgtttatcgtcagtatagcgcttattgcattctcatattctcaaagagatccgatgaaagacgtggaacaggagcttgaaacgcttcagctttccgccatgcaggaaatttacaagttaaaaaagaaaatgacggtgcttgaagaagaattgctggaaaccaacctcgtgatccgcaaagccaaaagcagcggcattaaccaaaaaatcgccaaacaaatcatttcaaaatataacaacgggatgtctgccgaagccatcgcaaaagcagagcacgtgtctgtcgaggacgtcaataccattattaaagataatgagaaggtgctcgtatgacaaaacggggcattcaggcttttgcagcaggcatgattttagcgacggccgtcctcgccgctgtcttttatttgactgaccatgaccaggcagctgccgttaaaactgaaaaaacagcattaacagaaaaagaagtaaacagctacctcgactcccagcaaaaagtctccgtcaaacgggatgactatcaaaaactgcttgactctaaagaaaaatcgctgagcaacgatcaaaactcagacgccaaaaagaaaaaggtaacatataaactgacgattaaagacggaatgagcactgctgatgtgtcatccattcttgaaaaagaagggattattccttcagcgaaggactttaatgattacgtaattgacgctggctaccacaaagaaatccgtgccggccatttcaaagtcgactcagatatgagctttaagaaaatcgtcaaaacattaacccgctaaaaaagcttgcaggcatcgtccattcagatggatacggccggcaggcttttttaatgagcaatataaaacggacccggtctatggccgggcccgtttttttatccgaattttccgctgatatagtcatgcgttttttggtgatccggctgtgaaaagatttttcccgtatcaccccactctaccagttcgcccatatagaaaaacgcggtttggtcagagacccttgcagcctgctgcatattgtgcgtcacaatgacaatcgtgtacttttctttcaaagtcaaaataagctcttctattttccgggtggacacggggtcgagggcagacgtcggttcatccatcagaaggacgtccggttttgtggcgagcgcccttgcgatgcacagccgctgctgctggccgcccgacagtgaaagcgcctgctggtgaagacgatccttcacttcatcccagagcgccgcggcctttaaagattcctcggcgatttcaagcagtttctttttatttttttcgccatgtattctcgggccgtagacgacattttcaaatatggactgcggaaacggattgcctttttgaaacaccataccgatctgttttcttaattctgccgcatccgtcttctccttcagcagattgcgtccgttatagatcatgtcacctgtcactttgacattcggagccatttgcagcattaagtttaatgttttaataaaagtggatttaccgcagccggacggaccgatgatggcagttactttccgctcctcaaatccgatcgtgatgtcttttaaagcttgatgagccccgtaccatacgttcatgccgtgaatatcaaataaattctgtgtgtgcaccgcttctttcacaacgctcacggtccttccccctatccgaactttccgttaatgtagtcatctgtcttttgctccttgggactcgtaaaaatctgttctgtctgcccgtattccactacttctccgtttaaaaagaatgccgtgcggtcagacaccctcagggcctgctgcatgttatgcgtaacgataataatagaataatctttcttcagttctgtcagcagcgtctcgattctggcgtttgaaatggggtccagagctgaggccggctcatctaaaagaagcacggcgggtttcatcgcaagcgtacgggcgatgcatagacgctgctgctggccgcctgataacgaaagagccgatgaatgaagccggtctttgacttcatcccaaagcgccgccttcgttaaactttcttctaccgcttcgtccaaaacggcttttctgcgttcacccgcatacttgagcgcatgtgtgatgttattgtaaatggatttcgggaacggattcggtttttgaaacaccataccgatctcccttctgagagacacgacattaatctcatctcccagaatattcagtccttcataaaggatgtccccctcgcttctcgcagaagggatggcatcattcattctgttaatctgtctcagaaatgttgattttccgcagccggacggaccgatcagagccgtcaccgcatgtttttcaatatccatgtttacatgtttaaccgcttgtttgtcaccgtaataaattgataaatcattcacttccaaaatcgaagactccggcgatcgctttgtctgttcggattgttccctgacgatgtgatctatcatgttttcgcctcttttcgattaatttgccgtaagctttttataaatggcagatccgagccatcttgcacaaaggttaaacaagagcaccgagatcaccagcactgccgagccgccgtttgcaatcgcttctgcatcgggaatgattccctgcgtattgacactccatatatgaaccgccagcgtttcagccggcctgaaaatgtttaaaggagaggcttccgaaaacgggttcaaatccgtaaagttcagccgcggcgttgtcagccccgctgtaaataacaatgccgccgcttctccgaatactcttcctgatgccaaaatggcgccggttaaaatcgaaggaatcgcactcggaatcagcacggttttgacggtataccatctcgatacgcctaaagcgagagaagcttctttcagctccttaggaactgcggtgagcgcgccttctgtcacccggaccattacgggaagattaaagaccgttaatgcgagcgcgcccccgataatcgtgtagccccatccggtcaggttcacaaacatcagcatgccgaacatcccgataacaatcgacggaagcgacgacagaacttcaatacacgttctgataaaatctgtgactttattttgcggcgcatattcagccataaagacgccgccccccacaccaagcggtatcgtgatcagcatggtgataaacagaatgtaaaaggagttaaaaagctgatcccgtatcccgccgccggacgcgatggcgctcgattttgacgtaagaaaatgcaaggtgatttcagagacgccgtgaatcagaatatacaaaaacaatcctgccaaaatcgccgcgatcacagcggcgcataaaccgaatacaccggtggccaatttatccgttattttccggttcattacactttcctcctagatgacaagtagcgtatgagcaatataaacagaaacgacataatgagaagaacaagccccatcgaccataacgtattattttcaatactgccgtatgtggtatggcccatgtttaaggtgataatcgtcgttaatgttcccgccgtatcaagcaagctttccggcagaagctttgtatttccgataaccatctgtacggcgagagcttctccgaacgctcttgccatcccgagcacgacagcggtcagcaatgtcggaaacgccgccgggatgagcaccttcctgattgtctgccatctcgtcgcaccaagcgcatatgaaccgtcgcgaaggtgtttcggaagtgacgcaagcgcatcagcggaaatcgacgtaatggtcggcagaatcataaccgatagcacgatcgttcccgccagaaggctgtgacccgttccgcttgatttaaaagagccaataaacggaaccaatactgtaagacctatgaatccataaacgacggacggaatgccgacaagcagctcaattaccggctgcagtacctttttcccccaagtcggcgcaatttccgtcataaacacagcacccgcgataccgaggggtgctgcgatcaaagcggaaagaaccgtgaccgcaaatgatccgaaaataaaaggcagcgcgccgaactcaggctttgcctgggttggattccaattcagacttgttaagaactcaatcgggcttacaccatttacaaaaaaagattgcagccccttaatgccgagaaagattgtgatcgccgctgatgccgcaatgataatcgccgcacagacagacacaatcactcttccgcggacttcatccaattgcctgttttgttttgagcttattaagcgttcgcttacagactctttttctctgtgatttatcatttgtttacactcctataaagaagaagaggcggggagcccgccctcccctcagctttgcttgccgtttgcgtcacgtgtgactttcatatcagagatcggaatgtagccctgatcttttacgatacttttctgaacatcatcactgttcaaatagtcaagaaatgtttttgccaggcctgacgcgtcacctttcgtataagagtgctcgtaagcccaaatcggatattcgcctgtgacgacatttttctcttccggtttgatgccgccgatcgataaaggcgttactttatcatcgtttatataagagaatgccagataaccgattgctcccggtgtttccgcaatgatttttttgactgtattggaggaatcctccgtgatgccctcagccggctctgctccgtcaagagcgtatttgacgaatgtagcgcgtgttcctgatgaatcaggacggttcacgagagtaatcttttgatctttcccgccaagctctttccagtttttgattttgcctgtaaagacgtctgccagctgttttttggttatatccttcacacccgcacccgggttaaccgcagctgccatcgctactaccgctacacggtgatcttttagggctttcgcatcaatgccttctttttcttcggcaaagacatctgagttgccgatttgcactgcgccttcagacacttgcgaaagacctgttcctgaacctcccgcttgtacctgcacatcagcatccggatgtttttccataaacttttccgccgctgccagtactaacggctgcatggctgatgaaccagaaatggttaaagaacctgatgcttttttatcctcacttgcagattggccgtccgtcttgccgctttcctttgcatttccgcatgctgcagcaacgatcataacagcagccatcagaagcgtaagcatccatttgttttttttcatttcctgaattccccctgcgtttaatgtgtaatttgtcctacacgtatagagtaaagggttcgtgtaaaatgcgtataaatcaaatgttaaggttttgtaaatccggatgtttttttgtataaaaaaaacgcccacaagttgtgagcgttttttctatcagttatttgtattgccgttttcagcgtctttctggattttatcttcgtttttctgcttcgtattattttcttcttgcttctttttcagctcgaagtatttgtctagtaccgcttccccaatgtcattggtgatagaatatctgtcattgtaattttcgtaagcccatggaactacgaccgaaatggcaacttcaggatgatctgcaggcgcataagctacaagtgttgtgttgtaagtagacgcgccggttcttgattttataggaccatcatagaaggcctgtgcggttcccgttttaccagcagggttataacttttattagcaaaatttgctcttgcagtaccttgagcgccttgcataacaagcttaaaaccttgctgaacacgtttaatttcactttccgtcatatcgaggcggttcattacttccgggttaaccgattcaacaacggctccgataccttttttagaatcaggctttcgtacttcttttacgatttgaggtttcatacgaaagcctccattggcaatggtcgatacatactgagccatttgaagcggtgtatatgtgtcaaattgtccgatcgcaaagtcaagcaggaaccctgactgtcttttagttcccacatatcctgtcgcttcattcggaagatcaatgcccgtttttacacctaaaccgaattcactgaagtaataacgaaatttatcgaatgcgctgtaatcaagcggcaatgaatgccccgatatatatttacccttaccaatcgcaatcgcagttttaaacatatatacgttagaggaacgctcaagagctgttaaatcatttatcggtcccatcacacttaccgactttttaggaggggaatctttaatattcaaaacttcgtccgtaaagatattcccgatttttatagcacctgtctgataaccagttaacagcgttgctccttttacagctgaacccatgttataagaagacgtcattgttcctagtgcataatcatcaattttatatttaccgtttacttgtttaatttgtttgcccgccattgtaagcacttctccgttgcgcgggtccatcattacgacaaatgccctgtcaagcagctgtgtacttggtcttgcctttgccgctcttaaatttttctcaataattttttcaacgtctttttgcaattcggtatctatggtgagcactaaatcgtcaccggctttaccttttgtaaccgtttcagtatctgtcacgtttccagaggagtcagttacgtttctcactttttctttttgtccctggagcagattttcatattgatactctaaataactttttccaaccctgtcattcctgctatagcctagcgacaaataatgttcaagaaggtttgaagggagcccttcattggaactcgagacactgccgagaactgattttaataatcctttatttggataagaccgttcccagtcagacgtcacgtcaacccccggcagttcatctaaatgttcgctgacgacggccatttctttagccgacacaccttcatttttgatgtattgaggagtcagtgagtagcctgaatccatctgccttttgatcgcaaggacctgcatatcttttgaagtgagttcgttcagctgtttgtccgtgatccgtttcagctgaagctggtataaatcatcgtcagacagctttttgtcctcagctttttgcttttcttttgccgtaatcagtttttttgcctcatcaggcctcgttaacatccaatagtcttttttgtcccgttcagtcacctttttggtgcttaccttaatcataccagacaatttttttgcgatttttaaacgctgcgcctgggtggttgaggctgaacgtgtatatgtaatcgcatttaatgctttattcgttacgatgggattaaggttccggtcgtatattttccctctcggaaccgccgtgctgacatcagactcctcttgcttgttggcggcgtttttatagtcatcaccctgaacgatctgcttgatgccaagctcgacgataatccacgtaaaaataagaaacgcggccaaaaacaaaaaattaagccggatcggcagtgattttttcttttctttgtttactgctattttctttttatttctcctcatgacatcaccttttcttatttacagaaagaaatgacaccctcttttcaggtgccatttttcattctaaaggttttttcgatatttttctacagataacccttttatctttctccttttataaaattcggttcagccgcccgtttttgtcggtcttcttccactgtttcatcagaagtttccgcatccagtttaatgtcttttataaagtaataaatcagcggatggccggctccgagcagcacgagcgccgtcggtattcccactttttccttcagcaatgtaacgatcaaaaggaagcacaggatggaaacgatccggcctgcatttaaaaacaattccctgagcacaatgtattcaattctggcctttctggcaagccgcgcccggcctatcacatcatatgtaagcgagacatacggcacaagcagaacgggatagccgatggcaataaacactccgtacataagaagcgtcgtgaagctcatatgaaaaattatgagaaacagggcgccgtacacaatcaatccgccgataagaatcgcctttttacgcgctctttttttgatgagccttgatgcaaaataataggcaaaaaaagaaaccgcagaattaacgaggccgaacgtcccgagcgccagttcactgtttgtcgcaatgaacacaaatacgctgattaaaaaaacaaaaatcccttctctcaagccttgaaaaaagtgcgcgttggtaatccggcgccaattcagattcgtgtggcgctcatcaaaaacttttttcagcataaaacggcctttcgactccctccgtttcagaaaaaagctcatgaccacggcgagagcaaataagccgagcgacaggctgaaaatgactgtataacccgtattgttttcaagtcttgaaatgacatacccggccacaatcggaccgatcattcccgccgatgaagacaagatgcctaaaaatccgttgaaaaaatctctcgtttcaggttccgttatttcgaaagtcagcacattaaaagccagccagtaaaagccgtaccccactccaagcacggcccctatcaaaacgagacgggaagccgcattttgcccggcaagcagcacacttaaataaaaagcagccaaaaagataaccccgaacctgagaataaacaccctgtcaatttttttagccagccgccccgccagcagaaaggtaaacggctgcatcgtcacgaccgataaattgtatatggccaaatcaataaattttcccgactgcttccacaaatacacgttgacaaatgtatttgacagcgcgatgcccaaagagtaaaggccgccaatcgtcaataacagcagcagccctttatttacttcgatgtcgccgataattttttttattttgctcatcattgactcccctttactacacattagtctgtctcactcaaactgagatatgtaaaaggaatcaaagtcaataaaaaaacaaggcctcccgcaggagaccttgtgatgatttaaatcaattattttgcttcgctgtaaagacgggcaacttcatcccaattcacaacattccagaaagctgaaatgtaatcaggacggcggttttggtagttcaggtagtaagcgtgctcccaaacgtcaagaccgaggataggcgttttgccttctgaaagcggtgaatcttggtttggcgtgcttgtaatttcaagtttgccgttgtttacaacaagccaagcccagccagaaccgaaacggccggcagctgctgcagcgaatttttctttaaattgatcgaagcttccgaatgtgcttttgatctcttcagcaagctcaccagtcggttcgcctccgccgttcggagataaaagagtccagaataaagagtggttcgcatgtccgccgccattgttgcggacagccgtgcggatatcctccggcactgcgtttaaatcagcaacaagctcatctacggatttctctgcaagcgctgatccttcgatcgctttgttcaggtttgtaacgtatgtgttatggtgcttcgtatggtgaatcgtcatcgtttccttatcgatatgcggttctaaagcatcataagcgtaaggcaattctggaagtttgtaagccataatttttttcctcctttaaatatatgtactgaaatgccgctatgcgcgaacttttctaatctcaatgtaacaaaagaaagcatggtaatcaatgaaaaagctcacaatccggcgattccagcagacatactacactttatccgttcacagccgaaattaaaccttctaaagcaccgtccacaagaagtatccgatcataaagagctgaatgactcctttggcgacgacgcttgttaaaaagccgattaaagagcccagccccacttttgcagcggatttaatatccttttgatgaacaaacacctcagcgcagacagcaccgataaacgggcctaaaataatgcctgccacgggaataacaaaaggcccgatcaataacccgatcgtgcttccccagatcgccgccctgctcccgccgtaccttttaatgccaagtaaatttgacacgtagtcagctgcgaataaaacggccgcaaataccgcctcaatgagccagaacaggtaggaatacgggctgaaggaaaacaaaaatccgtaaaggagaaaaccagccactataaaaataacgcttggaatcaccggatacaccagaccgataaaagcaacggcgaagaccgcgatgataatcacccaatacaaaacactcataacaaaaacaccctcctttgttttgcggagcgatcaccgcattccgcttttttcttattatgtatgattccttatcaccgctttaaatactctcgcttgtgttcatcccctgtgaacgatacaataagcaacatataccagtttaggctaggaagtgaagatgttgaacatatttacggctttatggaaaagtacatactctccggcagatattgcgaaaacacggtttcaagggataggaaaagcgatcctttatgtatttttgctgtctgtcctttttacgctgccgagcgcttattacctcagctccggcaccgtaaactcaatgaacggtttcaaaaccgtgttagaaaaagatttccctgatttcaaaatttcaaacggcgaattgcagacgaaagcctccgcctccaaggaaacggaagcgaacgggtttgtcatcgtgtttgatcccactgatgcttacggcgcgaaacaaatagcggcgaaacaaaacgcgatcggcattttaaaaaataaaatggtgcttgctgtagacggacaggcgacagaaatgaattattcattaatgcctgctgatatcacaaaaaaagaaatcatatcagctttaaaccaaaataaaacgatgatcgtcaccgtcctttccgttttgcttttcatcatgacggcagccggcaaattcattgaagtctcatttctcgccgtcatcggcctgatcataaaaaatgcgcaaagaaagacattgaattatcagcagctctggaagctttcggcttattccataacgctctccaccatattctttacgattatgcgcgcgcttgtcattacggtgccgagtgaatttttagtgaattggtttgtaaactttatcatccttttcctcgtcttaaaagagataccgccaagaaaaacagctgtgtaagactgcctgaggcagtcttcttttttgtcatgaacaaaatgggacaagcatacaatgaagtaaaaatgtatgcgggaggcggttggaatgaagcggcttacttttttattcggcagtttatttgtgatatttattatcttttacgatctgaaaatcgggacaatccctgctcaagaccttcctgcatacgcagcggcggcggctcagcctgcaaaacaggaagcatcatacagaacggttacggtcaaaaaaggtgatacggtgatgtcgatagtcggcgcacataaagcgccggaagatattgcgcaagattttgaaacgctgaatccgaatgtaaaagcaaacgccattcaggcaggcaccgcttataaattccccgtctatcgtaattaaacgttaatttcttgtcagttcggcaaatacactgttacaatataacatgtaaatagaagttgcctgacatgtaaaaggctctgcctcaaaagcggtaactacaattaaggagcgattgacaagtgagtgaaatcacacatcgtacaaaaacgcgtcccgtcaaagtgggacctttaacaataggcggaaataacgaagtcgtcattcagagtatgacgacgaccaaaacacacgacgtagaagcaacagtagcggaaatcaaccgattagccgaagccggctgccaaattgtccgggttgcatgccctgacgaacgtgcagctgacgcgattgccgacatcaaaaaaaggatttcgatccctctcgttgtcgatattcattttgattacaagcttgcattaaaagcaattgagggcggcgccgacaaaatcagaatcaacccgggaaacatcggccgacgcgaaaaagtggaagccgtcgtaaaagcggcgaaagaaaaaggaattccgatccggatcggcgtaaatgcaggatcattggaaaaacgcattttggaaaagtacggctatccgactgctgacggaatggttgagagcgcgcttcatcacattaaaatcctggaagatcttgacttccacgacatcattgtcagcatgaaagcgtctgatgtcaatctcgccatagaagcatacgaaaaagcgtcaaaagcatttgattatccgctccacctcggaattacagaatcaggcacgctgtttgccggaacggtaaaaagcgcggccggactcggagcgattttaagcaaaggaatcggaaacacgctccggatctctttgagcgctgacccggttgaagaagtaaaagtagccagagagctcctgaaatcgttcggtctcgcttcaaacgcggctacgcttatttcatgcccgacatgcggacggatcgaaattgatctcatcagcatcgcaaacgaggtggaagaatacatttcaaaagtaaaagcgccgattaaagtagccgttctcggatgcgccgttaacggaccaggcgaagcgagagaagccgatatcggtattgccggagcgcgcggcgaaggactgcttttccgcaaaggccaaatcgtccgcaaagtccctgaagaaacaatggtcgaagagctgaaaaaagaaatcgacaagctggcagaagaacactacgcaaagcttgaggcggaaaaagccaaagcagaacaagacacacaaaaagcttgacggatattccgccaagctttttgtgtgttttagaaaaacggtgtaatgaaaatgcccagcacaagggaaacaataccgattcccatcgcccatccgcctaaagcgcctgctcctcttcttctggcgatatagccgacgataatgccgcatgcccctaataaaacagggagcacaaacagggaaatgatagaaatagccaatgctgcataccctatcccccggccttcacttactccgtcccggttatcatcgcggtctgctgtccggtcagaagcgcgatatggctctgcaatttcagccgctgtttcttctgaataaacatcacgcgtgatatccgttccttccgatccatgatccacatagtagtcgttgccttttcgattttcgtaatcgtatgccaccttcaattccccctttttcttttatgaaaggagcttttttagtttccgcgttttttacggaatcatgtttgctaaactttgctggtattgttaattgtttatgttacacttgaagggatgaaaatataggagtgtggacatgttacggttaggtatagatattgacggcacggttacggcacaggatacatttgtcccttatttaaaccgctcatttcatctttccattactttggatgatatgactgattatgatctgactaagcttttgaacattacaaccgaggaattttgggaatggatgaatgttcatgaagcagtcatatataaagaagcaaagctcgcggaatttgccaagcaagcgctggacgggctgaaagaagaacatcgtctcatttacataacggcaagacgcggccacttagaagatgtaacgctggactggtttgcaaaccgggacattcattatgatcacattgagcttgtcggaggccatcacaaagtggaagctgtcaaaaaacacggcatcgatctgttttttgaagatcaccacggcaacgcgacaatgatcgcaaaagaagcgggcattccggtaatcctttttgattccccttacaatcagctccccatcgattccaatattatcagggtgcggaattggcttgaagccgtcgcctggatcaataaaaacaaacacagccttcagcatgtcaaaagctgaaaaaaacctcctgcttatgcaggaggttttttatcggcacgccggacaggtgccgtaaatttcaaatttatgaccgctgatgtcatacccttccaaattatcgtgaagcttatccatcggacaggactcaatttccttcgttttcccgcaggttaaacagataaaatggtgatggtggtgggtataagagcatgtaaaacggaacagtttttccccggaaagctccgttgtttccaaaatgccgagttcttcatataaagaaagatttctgtatatggtatcaaagctcagacccgggtagtcgtcatttaatgcggcaagcacgtttttggcggtcagatatttatcagaatcagcaaaaagctgcagcatgtcttctcgcttactcgtatatttataccctttttctttcagcaggttcaacgcttcttgtacgttcatgaggacctcccctttacatcacggtatcgctccaaaaagaaaatggcagctgtctgaacagcaggccattttcctatgctgtataaaattatacctataaaatgataaaaagtaaacgaaagcctagtgaatcgcggttttgaacttaccgcccctcgtttcatgtgtattcatgattgtaataaatgcgtttttatcaatttcaaacactatggatttcaattttgtcacttcaagccttgtcacgaccgcgtaaatgacttctttggattcatccgtatatccgccttttccctgaagcttggtggtcccccgtccaagccggtgcaaaatcgcgtctgaaatttccgcgtactggtctgcaacaataatgaccgctttcgtttcatcaagaccctggatgacggcgtcaatcgtcttcatggcaatataataagtcatgaaagaatacatcgcctgctccggcccgtatacaaaaccggcccaaataaaaataaacacattaatgagcataacgaattctccgactgaaaagggcagcttttttgtgagaaggataccgaggatttcagtaccgtccatcgagcctccgtttcggatgacaaggcctaccccgaaaccgagcaaaagccccccgaataccgtcgccaaaataggctgggtcgtaatggcctccacatgatgcaatgaggattcaatcagcgctaaaccgacgatcccgataaccgtagagatgagaaatgtttttccgatatatttatatccgaaaatcataaatggaatgttgagtaacacaacgaataaggcgaaattgaggatgggattggacataaagaggtggtctaaaattaatgaaacaccgataattcctccgtcgatcacattatttgggaccaaaaacaattcaatacttgcggcggctgagcccgctccgaccagaatcaagatgaccctgaagataaagtgtaaaaatgactctcttttatgctgtttatttggggtcataaaatctcctttcctttaataactattttaaacagtaagcaacttcattttaccattaaaagctgtaacattttaatgatttgctcaatacattatatttaaagaggtgaaagtatcgatgattttaatacaaagaattattttgcagcggctcaatcaagtcactccggacgatctgctgaaatattccaagcaatacggaatcagcattacgagaagtcaagcggctgaggtagcggctctgatgcacggtaaaaatatcaatatctttgatgaacaggagcggctgcgcctgctgaaaaaagtggaaacgataacctcaaaagaaacggcacggaaagttgacgaacttttcaatcaattctcagggtaaaaaaggaggggtgaattcccctccttcttcttattgagctaatattttttcaagaagctccttatcaaattgcttttctttcagcatttcgatttcaaaacggtatggcggcttcttatttttcttgtcttcgcccacatacggtgtttcaaggattttcggaatttcggccagctgctcatgatgaacaatgtactgcagcgcgttaaaaccgatctcaccgaacccgatattttcatgacggtctttccgggctcccctgatatttttactgtcgttcacatgaaggacttttatccggtcgatgccgacgattttatcaaactcattgagaacaccgtcaaaatcattggcaacatcatatcctgcatcatgcgtatggcaagtgtcaaagcagacggaaagatgttcattatgtgtaacgcccgcaatgatctcggcaagctcttcaaagcttcttccgcattctgacccttttcccgccattgtctccagcgcgatctgcacgctttgatccggatcaatcacttcgtttaatccttcaatgatttttttgatgcccgtttcagccccggcaccgacatgcgcccctggatgaagcacgatctgtttcgcgccgatcgctgccgttctttcaatttcagaacggagaaaatcaacgcccagctcaaacgttgccggattagtcgtatttccgatgttaatgatatatggcgcatgcacgacaatctcgtcgatgccgttttccttcatatgggcgcggcccgcttcaatattcaagtcttcaatttttttgcggcgcgtattttggggagcgcccgtatatatcataaatgtgttcgccccgtacgaaacggcttccttgcttgcggcaaggagcatatgttttccgctcattgagacgtgtgaacctattttcagcaacccgattccccctacttccctttgttagattggtttcttctctgttttcttctgattttttccatttcatagctcattttctttttatagcccggttttacttttttcggctttttcacaaggcgcttcgcaatttggtctgcctcattttccgtctttttacgtttcttgcggcggtggcggtcatcgccttttttccattctccgtttacaagctccgcataagcaaactcaatgcccatcttctcgagtcttacgagcgcatcttcgtcagaaagctcataaatggtcagtgcttggcctgatgagccggcgcgcgctgttcttcctacgcggtgaacataaaaatccagatcgtccggaagctcgtagttgatgacatggcttacgcctttaatgtcaattcctcttgccgcaaggtctgtcgcaatgacataagtgaactccagatcattaatctgcttcattacctttttacgctcacgcggcgttaatcccccgtgcagaaggccgattctcatgcctttttcagtcaggtatttcgcaatatggtcagcagtgtttttcgtatttgcaaacacaatgcccaaatacggattcagattagacatcatatcaaaaagcagcttgtctttatcacgctgtttagaaggaaccaaaacatgttcaatcttttcggctgtgattcttttcggctcaacatgcgcgtatttcggattttccatatactttttcaaaaacggcttcagcttttccggaatcgtagctgagaaaacaagcatctgaagttcttccggcatacgcgacccgatgtaatcaacgtcttccaaaaaccccaaatcaagcatcagatcagcttcgtcaatgacgagagactgcgctttatagacgttcaatgcctgcgccttaatcagatccgcaatccggcccggagttccgacgacgagatgaggctgtgttttcagcttatcaatcgatttttgcttgtccgttccgccgataaagcattttgtccggatctgctcgtcttctgcaccctgtgtgattttaagcgcttcctgataaatctgattggcaagctctctcgtcggcgctgtgataacagcctgtaccgtatcagaacccggatcaatccgattcaggataggcaataaataggcgtgggtttttcccgttcccgtttgggactgcccgatgacgctttcgtttttcaatacagcaggtatcagcctcttttgaatatctgtcggttcataaaaaccaaggcggtgaactgcatctataataaacggttttaagttgtatccatcaaatttagtttctttcatttttcccagctccttaaagcggcacattctgtgtccatcatcacattataaccgatttcacttaaaaacaccatgtcttgggggaatcctgttttcgagatagaaaagcaaatgccccctccgatgcatattgtaatagcagagagacagaaaggaggtacaagtatgtttccacagcagccgatgagaaatatggcgcagcagggccggccgttgatgaatccgcgtatgatgatgggaggcagaccgtcattgccgggccggcagctgatgcagcagggccggcagttattccctcagcagcagattgcaggagcaggcctgagaaacgcaggcacaggcggagggggcttaaaaggaatgctttcccgttttttacccggttcaggaggaagcgctgccgcgtccgctccgacagcggccagcggaggagcaggcgccggactgcagggattgcaggggattcagagtctggcaagtccggcatccctgtcgagcatgctcggcaacgtccagaaggtgctgggcgtggcgcagcaggttacgccgatgatccagcagtacggccctttagtacggaatctgcccgccatgatgaagctttacagtcagttaagcagcaacgatgatgagacagaagataaagatgagaataaatctgacgagacaaaagaaacagacgaacaagacaaaaaggatgaagctgaaaaaacagacgaaacagaagatgaaaacaaatcagacgcctcgtctaaaacgtcaaagaaaacgtctgaaaaagcatccgcttcaaaagaaaaagatgacgctgaagcaaaatcagaagaacggccgcgtccaaaaagaacatcgggcagatcaaaaccgaaattatatatttaacattctttgatatctcacgaaagattagctataatgagatcagaagaatgcaagatttaagccgtttaactacggctttttatattgcctctacactcacttttgataggaggacatctacattggacgttatcaaaatctcgccgcgcggctattgttacggcgttgttgatgccatggtcatagccaaaaacgcgtcactcgataaaacactgccaagacctatatatatactcggaatgatcgttcacaataagcatgtcacagatgcgtttgaagaagacggcatttacacgcttgacggcacaaaccgtctggagattttaaagcagattgaaaaaggaaccgttattttcacggctcacggagtatctccggaagtaagaaaagccgctgaggaaaaagggcttgttacgattgacgccacatgcccggacgtcacaaaaacacatgacttaatccgaaaagtaaaagcggaaggctatcacgtcatttatatcggcaaaaaaggccaccccgagcctgaaggagccgtcggcgtcgcccctgaaatcgtgcatctcgttgaaacagaggaagacgtgagaaacctcgatattcaggctgaaaaattaatcgttacaaaccaaacgacaatgtcccagtgggacgtccatgatattatggaatcagtcaaagaaaagtacccgcacgtggaatatcatcaggaaatctgtctggccacacaggttcgtcaagaagctgtatcagagcaggcaaaaaaagcggacttaaccattgttgtcggcgatccgaaaagcaataactccaacagactggctcaagtgtcagaagaaatcgccggaacaaaagcctatcgcatcggtgacatcagtgaactgaagctcgaatggctgaaagacgtcaataccgtcgccgttaccgcaggcgcgtcaacaccgacaccgattacaaaggaagtaatccgctttttagagcagttcgaccataacgatgagtctacatggcagcttgagcacaatgtgccgctcaaaaaaatccttccgaaagtaaaaataaaaaactgaggccgcggcctcagttttttttataagaaggcaaatggatttgtatctgtttcggaagcgaaaatacgcacgtcatagtttttctctccagccattgccgtaagcttctctgctgtgccttttctcatgatcttttcagcgtaatgcccgggatccacgacgtttaaccccatcatcatcgcgtcatgcgctacatgaaaataaaggtcgcccgtcacataaacatctgcacccttccgctttgcctgataaatgtatttatttccgtctccgccaagcaccgcgacttttttcaccttgctgtttcgctctccgaccatccggactccgttaacgtcaaacttctcttttacaaacagggcaaactcttcaagcgtcatgtcctgctgaagttttccgatgcggccaagccctttttcaagcggagactgctccaccggataaatatcatacgccacctcttcatacggatggctttttttcagcgcttttacgacggctttctccatacttgccggaaaaatggtctcaagtctcacttcatgaacgagttccaattctcccgtctgtccgataaacgggtccgctccgtccagaggcttaaagctgccgattccctcagaagaaaacgcgcaatggctgtaattgccgatatgtcccgctcctgcattgccaagtgcggttctgacagcttcttcatagtctttcgggacaaacacggcaagctttttcagcgggtccgaatatgtcgggacgagcacttccgtatctgtcaggccgagagcttccgcaagcagatcgttaactccgccgtccgccacatcaagattcgtatgagccgcatatacggcaatatcatgctttatacatttctcaatcagtcttccgccgggctgatcagtggtgatctgtttaagcggccgaaaaatcggcggatggtgagcgataattaagtcaacctttttctcaatagcttcatccaccgtttgttccagaacatccagcgtcaccatgacgtttttcaccggcttattcaatgtgccgatctgcagaccgattttgtctccttccaccgcaaaagccttcggtgaaaattgttcaaacagctggatgatttcctgtccgtttacatgtttaggcatgtccgattacctccttcagcagagagatccgctctttcagctcagctaatttttcttggttttcatgctttgcgctgcggctgatctgttcataaatttgttcagtatgcttaagttcctggctccatttccgaagaaacacttcattcttctcttttaacaaaaacggaccggcaagcattccggcagccatcgagatgtcccgataaggtgcatcacggtcgccggtttccgcgacgagtatttcataacactttccgtcttcttcaaggatcacttcatcaatcagttcatagccttcctgataaagccactctcttatatgaacggcatgaatattcggctgcagaatcagccgttcacgccccgtcagttttgtttttccggactccaaaatatgagcgatcagcgctccgcccatgcccgcaattgtaatggcgcccgcttctcccttttcaaggacgctcagcccgtcacctttccttacggagataagagtgcttaagtccagtttttccacctgctgtttggcggatagaaacggcccgtctgtaatttcaccggcaattgcgcggctcgctaaatgattcaaaacggcatagcaaggaagatacgcatggtctgacccgatatcagcaaccagggcacccggagggatatattccgctacagactgcaatcttttagataacttcatttcattcacaatatcacaacttttctcaggttctttttcctttactatcatataaaaaaaccgcccggaatccaagcggcggatagagtttttcatatgtcttttatatagggaccggtaaaattttatttaatcttagaaacccattttgccatgtcatccagcttttcggccggaacaaggcctgcaggcatcccgttgccgcccttttcaattcttgttttaatcgcagcgacatcttttcttttgccgacgccttttaagttcggccctgagacaccttcatagttttccccgtgacaggtgatgcagttcgctttataaatttcttcaggtgaagcgtttgcagtttccttttcggcatttttgctttcaccgccgcttgcgatctgatgcgcatctccatttcctttcactgacagaaagaaagtcagccctattcccagaactgcaatgagcaaaaaaggaatcagcggattccacttcatatctccatcccccttttttcattctccccctatgtaaacacttctaattctaacttatttttacaaaatgtaaatggtctcattaagccatttcactgatttcacaatttatacataaaacaaaaataactgttttgtttatccaaaattatctttattctattgtataatgaattgtatacgcttacaataaggaatataaataaacttatctcattatcccccttaaaaggacatgccgcatttttccgaactcatttgcaaaacaaatgcttatccagtaaaataaaggtatattatccatatatcttatacataaaaaagaacggatcaacagacccgttccattctattcgagaaaatccttcagacgtttgcttctgctcggatgtctcaatttgcgaagcgcttttgcttcaatttggcgaatacgctctctcgttactccaaacactttgccgacttcttccagcgttcttgtgcgtccgtcatccagaccgaaacggagacgcagcacgttttcttcacgatccgtcaacgtatccagcacgtcttccagctgttctttcaaaagctcatatgccgcatgatccgacggagacgtcgcttcctggtcttcgatgaaatcaccgagatgtgaatcgtcttcctcaccgatcggcgtttctaaagaaacaggctcttgggcaatttttaatatttcacggactttttcaggcgtaagatccatgtcttcagcaatctcttccggtgtcggctctctgcccagatcctgaagaagctgacgctgcacacggattaatttgttgatggtttccaccatgtgaacagggatacgaatcgttctcgcctggtcagcgatggcgcgtgtaatcgcctgtctgatccaccaagttgcatacgtactgaatttatatcctttacggtagtcaaacttttcgacggctttcatgagacccatgtttccttcttggattaagtctaagaaaagcatgccgcggccgacataccgtttagcaatgctgacaactaaacgaaggtttgcttcagccaatctgcgtttagattcctcgtcaccctcttcaattttttgagcgtaggtgatttcttctttagcagaaagaagatttacccgtccgatttccttgaggtacatgcggactggatcattgatctttacgccaggcggtacgctgaggtcattaaggtcaaattcttcttcggctttggcaagctgttgaatattaggatcttctgtttcttcattttcactaattaattcaacaccttgttctcctaaaaattcataatactcatccatttggtctgattcaatttcaaagctggacatgcgttcagcaatttcttcatatgttaaaacgccacgtttttttccagtttcagtcagctggtcttttacctgatccagtgtaagttctgtttctgtctcgtgggtttgtttatcagccattatggatccctccttccaaagcttgcaacgaattctaaaagcggtatgtttcttatccgtcccgggagctttctttctttttcagcatgcagggcagcagataataaatgacaattcatgatgaggttaagcgatctatttgctcctccgcaaggaatcattgccaatgagaacgcgagcctcttttttgatgttattttaatgatcggttcaatgcgacaatttcttgagccagagacgcagctttcacaaagtctttctgccgctctgcatccgctctttctgcttctttttcctttatcattgaccattttcggtgatccaacactttttttacgtaatcggataactcggcctctgagagctcctcgttcacttggagcatccctatatctgaaagcagctggctgatttcctcatcctgcattctcgccataagatgctgcggcgtcatttcagcgccctcttcataaacagcgtacagatatgctgccagcgcacgatgtccgtcaatgttaaattcaaagccgacacgttcaatcactttcttgatgacgtttctgtctctcagcatatgagcgagaagaagcctttccgcattctcataggcgggacggagacggcgccgtttcgcttttgtcgtcacccgggcccgtcttgtctgcggttcggcgtttttgtcgccgggggcgttttgtctggcatagatggaaagctgttcggtcagagattctaccgaaagagaaaattcggaggcgagctgcttcacatacatttcctgctcaagcgacccggaaagtgcgctgatttctttcagcacttctttcatgtaagcaagccggtctccttcatcagataagtttttccctttgcggaaatattgcattttaaaggccatgaccgtaacgcttgcatcaatgatatcggtcttgaatttttctccgccccgggttctgatataatcatcagggtcaagcccgtcaggcatcatgcatactcttaccttacaatcagctttctgcagcaggccggccgctttcagcgtagcctcatacccggctttatccgaatcgtagcagagaatgacctcctgaacatttcttctgaggattttcacatgctcttcggtgagcgacgtccccatggtggcgatgctttcttttacgcctgagctgacggcggatatgacatccgcgaagccttcaaacagaacggctctctcctctttcctgatcggcaggcgcgccttatggaagttatacagcagcttagatttatgaaacagcggcgtttccggactgttcatatatttcggctgctggcttccgagcgccctccctgaaaaagccgccacggctccgtgatgatcatgaatgggaaacataattctgtttctgaaacggtcaaaatacccgctgccgtcttcccttctgatcaacagacccgctttttccatctgttcttcctcaaaaccgcgctttttcaagaacttcgtcatgaaatcccaagaatccagcgcgtagccgatttcaaactcatctatgagctctttcgtaaaaccccttgataaaaggtaatctaacgcttcctggccttcctttgtattcattagcaaatgatggtaaaatttcttcaggagctcgtgagcttccgccatcttgtgctctccggaagattccggcctggatgcagagtgaatcgttatatcatcagggaaatcaatctgatatttatccgcaaggtgagaaacagcttccgtaaatgaatagccttccatctgccgtaaaaaagagaaaacgttcccgcccgctccgcacccgaagcaatgaaagatctgcttatcgctggagacggaaaacgagggcgtgttttcaccgtgaaacgggcagagcccaaagtagttgcggccttgctttttcaattggacataatcacctatgacttcaacaatgtctgctgactgctgcacctgattaactacttcatctggtatgcggtttcccatcttataacactccgtcgtacattattcgatgttttgatttgaaatcccttcatcattcgacaggatttttttaagcagggtaacaaatcgattccgatcttctttatttaattttttaggtcctttggaatggatgccgcttcttctcattttgcccgacatatgacggctcatcagagcgaagtcaatcgtgtcttcggtataagaacggcccctttccgataagacggcaatatttctgttcagcaaaagggatgccaaaccgatatcctgcgtgactacgatgtctcccgatctcacatggtttgcgatatataaatctgccgcttctttatgaggatcaacgtatatccagttctcgtttttgcttctggaaagctggtagtgttcaaatgatgcgacgaaaataacccgaacgctgaattgcgatgcaatgagcaatatttcctcttttacggggcatgcgtctgcatcgacaaaaatcgtcttttctttttcatttagaagactaattctccatccctccatcaatctcctgcataaaaacaagcgaaatcgcatatgctccatgactgcggatctatttttgtctttgtcgaaaaatttccgggagttattcttgacatcttactcgtaatagtttattcgtatcacactaagcttaaacctaaaaataaacattttatcacaattttttattataatacaaacttcgcgaagatgccatcctttttgtttattccctatttgcatacccaaaaacccaggataaagcgtcctgagttatcggccctttgtttttagatgatgaatgatgttcgctgtttcctcgaccgctttattcgaaacatcaacgacttggcagccgatccgggccacgattttctcgaaatactccagctcttctttaattctgttgatgttggcgtaaatggctttgtcgtttaagccgagagattttaaccgttcttttcgaatatggttcagtttatcaggactgatttttaaaccgatgcattttttcggatcaacgctgaacagttcttccggcggatcgacttcaggaacgatcggcacgttggccactttcagacgcttatgggcaagatattgagataatggggttttagacgttctggatactccgagcaggatgatatcggcttttaaaatgcctcttgggtccctgccatcgtcatatttgacggcaaactcgatcgcctcgacctttttgaaataatcttcatcaagctggcggacgcggcccggttcatatttcgccgtcagaccgtaggccgtttccattttatcgatgagcggaccgataatatcgtaatacagcacattcgctttttccgcttgttcaactaagtatttgcggatttcaggaacaacgagcgtaaaacaaataatgccgccgtccgctttggcgagagacacgacttcattgatggtgccgatatcttccacgtaaggtattcttctgatatgcgtatcatcggctgagccgttaaactggctgagcgaggcttttacaacgagttcggcggtttctccgactgagtctgatactacgtaaatgatgcgattgtccatgttatccccccgttagttttcaagcttatatgatttcattttctgataaactgacaagtatcttggtcatattcgttttcgtaaaccggccgatgacctcaaagcctttatccgtatctttaataacgggcagggcatcgatctgtttttcaattaaaaacttggcgatgtccatcacataatcgtcacgccggcagacggcgatattcggcattcttgtcataataatatgaaccggtattgaggcaagttcctgctggccgatgctcgcccgcagcaaatctttgcgtgacagcacaccgactaagacagcatcacgatctacgacaaataacgtgccgacatcttctaaaaacatggtgcagatggcatcgtataccgagacattttcattgatgacgacaggaatggattgaaaatctttcacttgcagctttttcagtttatcggcaagcagctgatttcccgttttccccgtataaaaataaccgacccgcggacgggcctctaagaagcctgacatggtgagtatggccaagtccggccgcagtgtggctctcgttaaattgagctgttctgcaatatgctctccggtaatcgggccgttttcctttacaatttgtaaaatttgttcttgccgtttatttaattcgatcgtactcaccacctttatggaagggtttatttatctatgtttttcattctgtgatgttatgtaaaaggggaaaagacgattgccgatcacacagcaaccgtctttttctttattttacaataagatgattcatattagcaaaagacttgatcacatctgcaagagcggtcatttgcgctaaacggttggtttttaatgcttcattgtccgcatttaccatcgtatgattaaagtaatcttcgatcggctcctttaatccgctgagcgcggtaagcgcctgttcatagtttttggaggcaaagctttccgcgacgctgtcttttgtcttttgataagcgtcaaacagctttttctcctgttcattttcaaacagatccggcttgatatcgcggctctcgccttttttgctgatggagatgacccgtcccagtgcctcagcggtttctttaaagcccggtgtgccgaggtgtttctcaagcactcttgccttatgaacagctgcatacggctcaaggtcagtgctgtccagaacggcttcaataacgtcatgacggatgtcttcagcattcaagacgtatttcagacgctgtgtaaagaaatcgaggagctcattttctttttccgtttctgtcaatgacagcagctctttaaaagaaatgccccagttgcggtcgatcagaatggaaacgatgccgcttgcctgacggcgcaaaccgtacggatcctgagaacctgtcggaatcacgtcgatgctgaagaaggaggcaatcgtgtccagtttatcagctaacgccacaaccgcgccggtaaaggttgaaggcacgtctcccccggccgctctcggcatatagtgctcatttaccgcggcagcgacggcttcatcttcgccgagcatgcgcgcatatttttctcccatgacgccttgaagctcagggaactcataaatcatgtgtgtaaccaggtcaaatttagaaatctcggcggcgcgcttgacaagtttttgcgtctgttcatcagccttcaggcggacggcaagtttgcccgcaatggcggccgctcttctcactttatctccaagggagccaagctcttcatggaaaacgatattttccagtttcttcacgtttgcatcgatgttcagcttttggtcttctttgtagaagaacgcagcatctgaaagtctcgctctcagcaccttctcgtttccgcgggcaacattttcaattgcatggctgttcccgtttcttaccgtaataaaatgaggcagcagattcccgttttcatcttttaccgggaagtagcgctgatgctctttcattgttgtcacaagcacttcttcaggcaaagaaagaaactcggattcaaaagagccgtaaagcgctgtcggatattccacaagttgattgacttcgttaagcagatcctcatcaatcggaatattccatttcttatcggccgcaagcgcgtccagctggctttggatcatttgtttgcgtactttcggatcagcaatgacgtgctgttctttcagcagctcttcgtatgatgacggtgcgtcaatagatacttcttcaccgagaaagcggtgtccctgtgtgttccgtcccgtccctacatttgtgatctcaaacggaataacgtcttttccgaagagagctgcaatccatttgatcgggcggatatagcgcaggtcttgtgtgccccagcgcatgtttttagggaaatgcattccggtaatcaggttttccagctgcggtaaaagtgtcttcgtctcttgtccagcctggaatttttggacgaagacatattccgtgccgtttacgtcttttatatacaggtcatccactccggcaccttggcctttggaaaacccgatagcggctttggtccagttcccgtcagcatccagagcgatttttttcgccgggccttttgcttcttcctgaatatcagcctgtttttctgctacgtcttttatatatactgccagacgtctcggtgtattaaaaagtttcacttcgccgtgagcgatatttttttcagccagccagccagtcagcttttcaccgagctgcaccatgctgtcatgtaaaaaacgcgccggcatttcctcgagtccgatctctaaaagcaagtcttgtttactcatgggaagagccctcctctttaagcattgggaaccctaatttttcccgttcttcataatacgtttttgctacttttctcgctaagttgcggacacggccgatataacccgtccgctctgtcaccgagatcgcgccttttgcatcgagcagattaaatgtgtgagagcatttcagcacataatcataggccggatgcacaagcccgttatccatttgtctgatcgcttctttttcatacgtgctgaacaaatggaatagcatatccacatctgatgtttcaaaagtataaacggaatgttcatattcagccatcataaacaaatccttcactgtaaatcctgacgtccattcaagatcaaagacgttttctttatcctgaatataagacgcaagacgttcaatgccgtacgtgatctcaacagacaccggtttacattcaattccgcccacctgctggaagtacgtaaactgggtgatttccatcccgtcaagccatacttcccagccgagtcccgcacagcctaaagacgggttttcccagttgtcttctacgaaacgaatatcatgctcgagtgggttaatgccgagcgcgcgcaatgaatctaggtaaagctcttggatgttatcaggcgacggcttgataatgacttggaattggtgatgctgataaagcctgttcgggttttctccgtatcgcccatccgcaggccgtctggacggctcaacgtaagctactttccacggctccggcccgatgctccgtaaaaatgtatacgggctcattgtgcctgcgcctttctccacatcatacgcctgcatgagcacacagccttcactcgaccagtgcttctgcaaggttaaaatcatatcttgaatgttcatttcaagcacctccactttctccattcttttacaagtgcggcggcaatcaaaaaactcccgtctctatgcttgccagccgcaaacatagggacgagagttctcccgcggttccaccctagttgctgaggatgtgaatcactcagcctctttttaaagggttgctcaagaatgcctttcgttgcgcgctcatccttagcttacactgtcctaaggtcgcttatatgagttggacgcaagtacttctttctgtcactgcaacatattttataataaatgatcatataaaaagatgggcagaatgtcaacttttgttttcatccaaaaggtgcttcatgctttccatctggtctaaaaaccgtttagactttaaataaagccctgaatattcctcataatacagatcgataacccgtttaagttcgtttttggtttcctgttttaatgagacgctgccgagccttccgatatcaaagtaataaaaaagccttagcagccttgccgtttgcggcgaaatcggaactttgtacggatcctttccaaagcagcggtggcagataaaaccattatctcttaccgaaaaatgaaacgtcccgtcccggcttttgcagtggacacaatgattcagctccggatacagtcccatgacgccgagcattttcatctgaacgatgaaggtgatcacgtccgggtcagtcccttcattcagcctcttaaaggattcgagaatcaattcgaataaataggggttcggtttcttctcttccgttcctttgtcagtaagttcagcgataaaagcggcatatgccgtcaaaaacaagtcttctctgatcgttctcatgctgagaatcatttcaccctgctggagcgtgccgagtccggatgttctttgcattaaaaatgacccgtacaaaaacggctggctgactgctgacagccggctggctgacttcctggcgcctcttgccataacgccgattttgccgtgttccctcgtcagcaatgtcacgattttattcgtctctccgtagtcattcgtacggagcacgattccttcacattttgtcagcatttccgcaccttccaacaatgggaggggccaagaggtttacaaaattggaaaatcaattcgggctagctcatcttccggttcttcgggtctttccaggttctctttttccagttctttaaaaagaaggtacgtatcaacacttcctgtttgagaaaatacgttccaggtaaaattcaacacaaaaaacccacctttcatcattaaactagcttgccaatccaaattcttacccttatcttgacctgatgtcctccttttcatgttaaacaaattttgctaacgaatccctgtttctgtgaggtaatcccacacctcacgtatgggctgaaatcatttaatattcatcctctttgaaaccgaaatcacgcagctgagacattttattccgccagtccttctgcacttttacccatagttccaggtaaacgcgtgagcccagcagcgcttcaatatcagcccgcgctcttttgccgacttctttcagaagagctccttttttcccgatgacgattcctttttgagaatcccgctcgaccacaatggtggcggcgacatggatggagccgttttcctgtcctttaatggactcgatagcgacagcgatgctgtgcggcacttcttcccttgtaagatggagcaccttttctctgatcagttcagaaataataaaccgctctggatggtcagtcacctgatcactcggatagaactgaggcccttccggtaaatacgcttcaatctgtgcgagcagggtctcgacgttgtttccttccaaagctgagatcggcacgatttccttaaacggatagcgcgtacggtactcatcaattaaaagaaggagctgatcagggtggatcttatcaattttgtttacgatcagaaaaacgggcgtggacgtctgtccgagcttttcaatgataaactcgtcgccctttccgtacccttcttcggcgttgatcataaataacaccaagtcaacttctttcagcgtgttctgcgccactttcatcataaaatcgccaagcttgtgcttcggcttgtgaatacccggtgtatcaataaaaatggtctgcgatgtgcctgttgtcagcaccccttggactttatttcttgtcgtctggggtttgtcgctcatgatggcgatcttttgaccgatgaccctgtttaaaaaggtagactttcctacgttcggtcttccgatgatagatacaaatcctgatttaaagctttcgttcgtcatgtaaatcctccgatgaaaatgcgcccggcaataattcttccgcagtcatttcttttatttgtccttgtaagttggtcagaacaacaagcatatcctttgaacacagctcggaaatcacttgtctgcaggctccgcacggcgaaaccggtcccggagtgtccgcagccacggcgagcatcacaaattccgtatccccctcggaaacagctttgaatatcgccgtgcgttcggcacagttgcacatgctgtatgccgcattttcaatgttgcagcctctgtacacttttccgtctttggtaagaagagcggctcccactctgaagtttgaatacggcacatacgctgtgtcccgcgcttttaatgcttctgcaatcaattcttgtctgttcatgtgtacttattcctctcttacctttatcctgtatgataccgctgtcacttttattttacataattatgattggtttttcacgcccatttttggcaatgtaaaataattgtaagaatcttctgctaacatattttcggcaagaagatgagtaaaccaatgatacacgaaatcacggcaaagacgcaaacggctccggcggccgcgtcttttgccgcttttgcgagcggatgatactgatcggtaactaaatcaacaacatgctctatcgcggtatttacaagctccagagcaagcatcccgccgatcagcatcaaaacaacggcccattcggccgtgctgagcccggtgagaaaaccgcaaagaataacggcgcaggccgcgatgatatgaaattgaaaattacgctctgaccgcgccgttttccagattcccctccatgcatggacaaagcttttcaggaacctgctccactcgtttttatgatctcgtgagtccatactcatccagcaaatccttttgctttgaaaacatttcttcctcttcttcttttgtcatgtgatcatagccaagcaaatgcaaaaagccgtggacagccagaaaaccgagctctctcataaacgaatggccgtactcttcggcctgctctttcgttctgtctgcgctgatgataatatctcctaaaactggcggcatgtcggcgcccacgatttcaacctcgtcttcgccttcttcctcaagcgcaaacgaaattacgtcagtcggagtgtcttttccccggtagtctctgttgatttctctgatttcatcatttgtcacaatcgtaaccgatacttcagcctgatcctgaacgccttctttttccgccgcaaattggagcagcttctccacttcctggagcgcatcggctgaaacgctgtttgtttcatcaacaatatctatgagtaaacccatttatttcaccttcttcgtagcctccggatattcaatccgggagtggaaaattccttttaaagtcgcacatagtgtttttgcgatcgtatccagctctcggaatgtgagatcacattctgagaactgcccgtcctgaagcttgtcggatataatcccccgcaccagtttttcaatacgttcgggattgggattatgcatggaacggacggcggcttcgacactgtcggccactgagataatagccgcttcttttgattgcggcttcggtcccgggtagcggaactctttctctgtaatctggtcgcctttttctttcgctttataataaaagaattttaaaagggacgttccgtgatgctgctccgcgatatccacaagctctttcggaaacttgtagcttctgagcatattcgcaccgtctgtcgtatgtgcgatgatgatatttttgctgagctgaggagacagcttatcatgcggattatccatattcatctgattttcaataaaatattgcgggcgtttcgttttgccgagatcgtgataatacgctccgacccgtgctaaaagaccgttcgcccctacagcttcacaggccgcctccgacagatttgccaccatgacgctgtgatgatatgtacctggtgtttccgttaaaatcttgcgaagcaggggatggttcggattagacagttcaatcagcctcatcgttgaaagaatcccgaatcccgtctcaaaaaacggcatcaggccgataatcaaaacggatgaagcaagccccgagacgacccccatcagcatcagcgttccgatttcaacaggtgacagcgccgtattttgtattagcaaaagcgacagcacgataatcatattaataaatgatacaaacagtcccgcctgcaatatctttgatctcgcgttatgttttcccaaaaacagaatgcctgaaatgctgcttattaaatagtaaataccgatcacataattaaacgttcccgtcacgccttgattaaacatcatactgccgcaaatcgccaaaatgatgcttcctaaaatagcgagcctttcattaagcagcagcctgaataatatggcgccggcggcgatcggaactaaataaccgatattcgtgtattcgattttttgaaacaggctgacgacttccattatgacaagaatcagcgttgtaataatggaaaataacaaaagtgatttatttttcagcttaagttcctgctgctgtttctcaaaatagtagacaagcgtagcaatgaacagaccgatcatcagaaggagaccgctgatcggttttaacaggttggaattgttcaaaagtcccgttaattcgagctttctgtatacttcccgatcgatcaggtcattctcttcaacaagaacctgtccttgtttgatttgaaccggctggacactgtctgacgcttcctggcgctttgcatcagtcgctttcggatcaaatacgtaattcgggatgaccgcatattttccgatttcagttgccgctgacaaatactttgacggcacggaagcgcttttcagctcttttgcgactttttccttcgcttccgctaatttttcggacggtatctcactgctcatcaccgtatttaccgcagtaatgacggaatctcttacaaatgagaaatcttcattgttcgcatggagaagcgatgtaatagcatcttccgagatggattcattgacatcctgtgtcagcttgcttttcaccgcttttaccagcgatttttccgaaggtgactttttgtctttatccgcatcttgtttcacttcaccgatgctgtcaaaaatggaagtgatcaggtcaagccggttgtcggtatagccttttttcagagtgtactgatcttccaccgcatcttcggccgcctgttttttcgcttccgtcgcctgctggtcttccacggtggcgggcgcgtaaatcgtcttatcactgactgaaaacaaatccaaattaagtgattcaggttttacatgaataaagagcaaaccaaacatgatcgctgaaagcagcagatacagcagcacatgggctgagcgggcatgtctgaaactgcggaaccgttcccgggcgcctttaccctttcccttctttttcaaaacaagaacctcctccctgaaacatcaggaacacatcatataaaaatgacccgataacgggagatcgggtcattttgcattacttttgcttatcataagcttcaataatttttgcaacaagcggatgtctgaccacatctgtctggtcaagttcaatcacggaaatgccgtttatgtccttcagcatatccctcgctactgcaagtcccgatgtgacgcctttcggcaggtcaatttggcttacgtcgcccgtaatgatcattttagagccaaaacccaatctcgtcaaaaacattttcatttgagcgggggtggtattctgggcctcatcaagaatcacatacgcgtcgtcaagcgtccgccctctcatataggcgagcggggcgatttcgataacccctctttccataagacgttccgtatggtcgcttccgagcacatcatggagcgcgtcatacagcgggcgcaggtaaggatctactttttcctttaaatctccgggcagaaaaccgaggctctcgccggcttccacagcgggtcttgttaaaatgatttttttaatgtggccgttttttaaagcatgcaccgcttttacgaccgccaaatatgttttgccggttcccgccggcccgatgccgaacaccatgtcgtttttcttcatcgccgcgacatattctctctggccgagggttttgacacggatcggtttgccttttgccgttttcgttatttcttcttcatacatgctttcaaaatagtccagttcatctttctttgccattttcacggcatacagcacatcacgttccgaaatctcgatccccttgcgaattaaagtaaggagcgagcccaataatctgtcagcaatctcaaaagactcatcattgccggaaacgtaaatggtttcaccgcgtgtgatgatgcttacgcccagatccttctccatcaaatgtaaaaaggcgtcttggctgccgaacaaagaaagtgcttcgtccgggcttttcagtttgtgattcatcgcaagtaaatgttctgccattctttagtctccctgaacaataggtgtggtttgaacgatatcttctataacttggtagagaataatcaactttactttaccattctcaacggattggtgcaaaactttttcactttccacctctccgctgccgcttaatcgcttttctacgtcttgcctgcccattttgatgccggcctgaaccgcttcgtcttttttataagtccgcacggatgtttcgctttctcttatatgttcttggacgtaagaaacagggagctttaaccccagaaattgaaacgggtgcttttcttcctcggttttcggatgttttagcggctcttctttaaacccgaagccccaaaaaggtacgccccacgatccgaaagacagcttgtgcttcgtccttactttacccgtatatagcgtaaatgatgtttcaagaggcacggttacttcagacttgtaccatgtttctccgtaaatttccgctttggaggcgactttcttctgctgctcttcattaccgatcagacctgagacaaggagctggcctttgtcaacatgatcgttcacaaaagccatcggctgacccttttgcacgaacattcttttgatgaccgctttctttttggcaacgatatggcgggggctcaagtatttttcttttgtcggttcatttttttcgaccactttcatatgaagggctgtcccgttcaactccacaccgacccacgtaatattttcgatgccgtttgttaatgatttttgaattttctccggcgtcatcattaaaaattgcaaacggccttttttcacaccgatttcttcaaggtgcttcaccatctgatgctcagtttcgggcttggcccctttaatatcgatttcccaaatcatgttggacaaaaggaacaatataatgaaaaaaatcacaaatcccgcggtaaagcctatgtttaatttagatttgagaagcagaaagggcaggccctttctttttgtaaagcttgctttgcattcatggtttctgatgactcttctgaaagcatgtacatcctgaagctgaatcataagcattacacagtcttgcttttttttcaccgcaaagatggcgattccgtttcttgtacattcattaagcagccgttcaattccttttcctttgacttccatttggactttacccgaaaaaaatgacagccatttgtttttcacattatttccccccggctttatgaatcgacatatcgtacgtgatctatcgtgccttccaaaagaatttcctcaggaaggattgccttaatgaccaagttttttcctgatatgatacattgcccctgcttgagcatcagcctgacttcttcttcgctgaacagcaagaggcctctgtgattctctatgtagatatgaagtctgccgaccatcgtaatacgaggcagatccatcataacgtccgggggaatttccaatgctcttgtcagccacgcctttacacgattctttctttgccccataaaaaaagaaccccctttcatctcatatgtatgattagaaaaggggttctaacactttattttttacggatgctccgcatggtccggtgaggttttttcgcacggggcgggcctaaaatctcactgaatatgatgccttgcaccgcagtttctttctttattttgagggctggtttcttcagagtcgtatttcgttggcgtgcagatgtcagctgatgttcaagcccattgaacatctgctctgtctccgcaagacgcttttcagcttcccttctttttttctcaaaagggttctcttctggaacggcaggcatttcttccgcttccggcttgtgctctttatgcggctgtttgtgctcctgcttttttgcctgattctcgggacgtgtgcccggcggacgtttttcatctttgtttttcttgccgaatattgccgatataatgccgatgacggcggcaatgacgagcggatttgtcagaatctcgtgcatatagcggctccctccttaatagagaggttattgttggtcttcatcttgctggtcattcgtcagcttgccgatagaatccctcatgtccgtgtcagcgtcgatattttttatgttcatataatccatgacaccgatgttgccttcacgcaatgcttcagccatcgcaagcggaacttccgcttcggcttccacgactttcgcacgcatttcttctacgcgtgcgcgcatttcctgctcttgggcgacggccatggcgcggcgctcttccgctttggcctgcgcaatgtttttgtctgcttccgcctgatctgtctgaagaatcgctccgatgtttttgccgatatcaacgtcggcgatgtcaatcgagagaatttcaaatgcggtgcctgaatccagccctttgccaagaacggtctgtgaaatcatatcagggttttcaagcacttttttatgattattcgaggaaccgattgtcgagacaatcccttctccgacacgggcgacaaccgtctcttctcccgctcccccgacaagacggtcgatattggctcttaccgtgattctggcttttgcttttacttcaattccgtccatggcgacacccgcgataaacggtgtttcaataaccttcggatttacgctcatctgtacggcttccaatacgtcacgcccggccaggtcaatggctgcgcatcgctcgaatgacagctcaatattggcgcgctgtgccgcaatcagggcattgaccaccctgtcgacattacctccggccagatagtggctttcgagctgatttgttgtcgcagcaaggccggctttatgcgctttgattaacggattgacaacgcggcttggtataacgcggcgcagcctcatcccgaccaaagtgaaaatactgattctgactcctgctgcaagcgccgaaatccatagcatcaccggtacaaaggtgaagaatatggctaacacaataatggcagctgcaactaatgctaaaatcgccaaacttgacagttccatctaattcctcctcaaggttatcatctatatttctctcacgacaatgcgtgagccttccactttcactactttcacctgtctgtctttttcagtgaatgacccttccgaaacaacatccaagcgttcatcatcaataatgacggtgcctgacggtctgagggctgtagcggtaacgccgactttccccaatagctccgtccggttctgatttgagacataaccgctctctgtgcttgttgaatcagttaatatcaatttcttaaagaatttcattcgtttccccaacacccttgttaatatgataaaggctgtaatagacacagcaaaggcgatcaagagagaaaccgccattacagtaaagctgcccgcagcgagaaagaggcttgcgatgacgcccgcaatcccgataaggccgattatacccccgggcagaaaaatctctaaaaggataaacaccaagcccgcgcagaataagaatatactgtcatagccggcaaatccggctgcgatatggcctgcgaaaaacagcagcaaggctgtcagtccgacggcacccggtattccgaggcccggcgaaaacaattcaatggtcaaaccaagcaaagcaagcgttaataagacggggacaacaaacggattcgtcagccatctgcttaatttgccgacaaaaccctcttttgcatgatgaacatccgatttatcaaaaccgagctttgtatataaagcatcaaggtttgaaaccgtaccctccgaatatccgacttccttggctttttcagctgtcagtgtcagcagctttcccttaggggcgcccgcttcttttgcattgacggcggggtctgccatggccagggcatatttcgggtttcggttgtttttagccgctgcgtcctccatttctgcatgccacagcgattgggcctttttgtctgccgcgtttccttttccgtcgatgatggctgcggcacccatttttccgcccggcgccatataaatttcatctgcctgaagcgctatataagccccggcagaaagcgcccgtttattcacgtaagcggtaacaggaacatccgagccgccgatgatatctgcaatatccaaggctgattgaacggcgcctcccggtgtattgatgtcaaggataatgtgtgacgcaccggattccttcgcatctttgaaagaacgcgataaaaacgaggcgagcccctgttcgacatttttctcaaccgggatgacatacaccgatggatgatcagcttttgcgttcaactgaacccctaataaagataatacaaataagcccaatagagcaacagcaattccggttttttttcggaacaaggcaaatataccctccttcctgcttcattcttctttatatacgtaacaaatgtactttagtttcatttttttatgtataaaaaaagacatctctccaggaaagatgtctttttcttgtcaattaggataattgactgctgacaagtctgttaatcacactgccgtcagctttaccttttactttaggcataatagcactcatcactttgcccatgtccgctttggagctcgcaccgacttcagcgatggtttcatttacgattgtctgcagctcttcttcagaaagctgcttcggtaaataaacttctaaaatgtccagctctttttgaactttatctactaaatctaaacgattagcgtttgaaaattcatggagggagtctttacgttgcttaagttcacgagataggacagtaagttcctcatcctcggtcaaactgtctttcttaagcttaattgcttcgttttgaagtgaagctttcaccattcgaacgacagtcagtttgtctttctcacggcttttcatatacagcttcatatcttggttaagtcgctcaagaagactcataaatccaccctcttttagaatttgcgttttctagcagcttctgactttttcttgcgctttacgctaggtttttcataaaattcgcgctttcttgcttcttgcaaagtacctgtctttgatacactgcgtttgaagcgacgaagagcatcttcaagcgattcgttttttctaacgaccgtttttgacattctctttccctccctccgaatacaccaatcgactacctttaaaaagatacacatataaacatgtactttgacattataatataagccatcagtcaggtcaactaagtgagttcacttttccggcatgaaacaggcggcttgtctatataatgacggaaaggggtgtttcgtttgctgatactgattcttttcactgcacttatcctgatttttttactcggaatgagcctgctcagacagggactgatcgcattaacgtattcaaaaattgagaagagcctgctcttgtttaccgaccacccgttgaaagcttttctcattagcatcgtattcacgggttttcttcagagcagctcagcctttatggtcattgttatcggctttgtcagtgcaggcgctttaccttttaaacggacgattccgatgattctcggcacgaatgtcggctccacatttacgacggaatttttggccataaaaatggatgtgctcatttgggttctttttatcggcggccttgtgttgattctcatccgtaaatacccgttcaggcagatcggcataagcttcctcggtctcggcatcatctttttttgcatcacatgcttcagccgtcttgccgttccgctgacagaaatgaaggcgggagcggaggtattgcgccatgtaaatgattcaagctggtccgctctttttatcggcatgatattgactgcaatcattcattcaagctccgtctgcatcggcattttaatgagctttatgaacgaagggatgatcggcattgatcaggcggtcagcgtcgttttgggatctaatatcgggacatgcgtcacggccgtcatggctgctgtttcaggcggctatgccgccagacagaccgccggcgctcacgttgtctttaatattctcggcgtactcctcgtgtttcccttcctgtccgtaacagcggattttacggagcggctgtctgacgatcccgcgcaaatgatcgcgcatttcagccttttgttcaatgttgtcaccgccttattgtttctgccgttcactcatttgttttaccggctgattgacaggctgatccctgcgaaaccgtaaaaaaaccgatgcgcgaaagcatcggttttttttatctgttatgaagacatgcgcatgttctgagtcatttcttcctcaacgacgcggacgaattgtccttcattgtacggatagccagctttttgaattttgactttgacaagtttaccgattaaatcttccgagcctttgaagacgactttcatgtaattgtccgtatagccgacgaacatgccgtcttcatcagactctttaaacgtctcctccggaatgatttccagaacctctccttcgtaatcagaggcatattctttggcaagctggtcagacaaggcaatcagcttgtgcacccgttcatttttcacattctcgtcaacctggtcttccattctggccgcaggtgttccggtgcgtttgctgtaagggaatacatgaagctcagaaaacttatgttctttaatgaaccggtatgtttccataaattcttcttctgtttcacccgggaaaccgacgataacatcagaagtaacggcaagacccggcagtgcttctttcagcttatttaaacggtcagcgaaaaattccatcgtatattttcgtctcatccgtttcagcacggtgtttgatcctgattgaatcgggatgtgaaggtggcggacgattttatcagacgcatccagcacttcaatcacttcatcagtgatttggcttgcttcaatagatgaaattctgatccgtttcagtccctctacacgtgtatccaactcacgaagaagcttggcgaaattataatctttcatatcttcgccgtagccgcccgtatgaatccccgtcagaacgatttctttataaccggcatccaccagctgctgcgcctgtttaatgacttcttcgggatcgcgggaacgaagcaggccgcgcgcccaagggataatgcagaacgtacagaagttgttgcagccctcttggattttcaatgacgctcttgtccggtcagtaaaagcgggaacatccagctcttcaaacacgcgtgctttcataatgttgccgacaccgttgatcggctggcgctcttccctgtactgctcaatgtagccgagcattttttcacgatcctgcgtgccgacgacgatgtcaacacccgggatggccataatttctgccggggatgtttgcgcatagcaccctgttacgcagattacgccgtcaggattttggcggatcgcccgtctgatgacttgacggctttttttatctcccgtgtttgttaccgtacatgtattaatgacatatacatctgctgtctgttcgaattcttttcgttcataacccgcatctttaaacagctgccagattgcttctgtttcataatgattgaccttgcagccaagggtatgaaaagcaacagttgccattactgatcacctcttaataactctgtatgataggaaactgcgcttaacgcgtaaagcggcgcagtttcagtccgtaaaattctcggtccgaggccgcataagacggcgcctttttctgaaagctgctgaacttcagactcagtcagaccgccttcagggccgaatacgattaaaagagacgaaccttgcggaaggcttttgagttccgcggcgaaagcgcccgtttctccctgctttgatgactcctcgtatgcaacgacacatttatcgacattctccgccatctcaagcagctgccggaatgtatgaacggttttcacttcgggaatttcattgcggtacgattgctccgccgcttccttcgcgattttcgcccatctctcccgctttttctttgcctttttgtcgtcaagcttaacgacggatcgggcgccttgaaaagggatgaacatacttgccccgagctcggtccctttttggataatccactcaagcttatcgcctttcggaaggccgctggcgatcctgatctttaacggcagttcacggttttcccccgtccattcagcgacgctgcatgatatatgatctttagaaacctctttgagcaggcataacgcttcatggccgtctttcgaacagcagataatccggcctcccgcactcattctcatgacgttggcaatatggtggacgtcttcccccgtgatgtgaaaatcggggctttcgtccatctcctgcttcgtgagctcgataaaatatcgttgcatacgctgtgacacctactaactgttattttttcgcgatgatgctgacccaatcttccatagacagaatttctatgatggtaaagccggctttttccaacgcttcttttacttcctgttttttctggccgataatgccagaagtaataaaatggcctccgtctttgagcaggtcgtacgcctgcgatgtaaagcggagaatcacttccgccaaaatattcgcgacaatgacatcgtgttcgcctgtgatgccgtctagcaaattgttctgtttcacttcagccgtatcgcttactttgttcaatttcacattcagacgcgcgctttcaacagcgaccgggtcaagatcatacgcatgaaccgattcagcctcaagcatggcggctgcaatgctcaaaattcctgaaccagtgccgacatcaatgacacggtctcctttttgaacgatacgctcaagcgcctgaatacacagaacggttgtcggatgcgttcccgtaccgaatgccatgcccgggtccatttcgataatcagttcatccgtatgcaccggtgtatatgtttcccaggtgggaacgatcgtgaacttttcagaaattttcacaggatggtaatactttttccaagctgtcgcccattcttcttcattaacttcagaaatggtgattttgtttctgcccaaatcaatatcgtacagcagcagattattaatcgtctctttaatgccgtcgaccgtttcgcccaggaaactgttgatcgggagatacgctttgactatgacaccctcatcggggtaatcattggggtcgagctggtagatttccccgtaaacattctcacgctctttcattaaatcaagcggatcttcgatgacaaccccgctcgcaccagcttcatgcaaaatatttgagatgggttcgaccgcttcatgtgttgtgtgaatgctgatttcggaccatttcaaaactaccaactcctatccaatcattactcgcctttaaatgcgcgttttactttgtcaaagaaactcatttcttgttcatccggcaggttaccgctcacttcagcaaactcgcggatgatgtctttttgtttatctgtcagatttgtcggtgtgacgacgcggacgacaatgtgctggtcgccttgtccgtagccccggacattctgcacgcctttgcctcttaatctgaattttgtgccggtttgtgtgccggcaggaattttcaatttcacttttccgtgaagtgtcggcacttccacttcgtctccgagtgccgcttgggcaaacgttaacggcatttcacagtaaatatcatctccgtcacgctcaaagaactcgtgggcgcgcacatggaatacgacaaacagatctcccggaggacctccgtttacacccggttcaccttgacccggaacgcgcagctgctgtccgtcatccacaccggcagggatcgtaacgttgatttttttccgttttttcactttgcccgtgccgccgcagtccgcacacttgtttttgatgatttttcctgttccttcacagtggtggcagactcttcggttaaccactttgccaaacggcgtgttctgttcgacattcagctggcctgaacctccgcaatgcgagcacgtttccggctttgttcccggctttgcgccagagcctttacatgtttcgcaattctcttcgcgcggaatttcaatgatcgtctcttttccgaaagccgcatcttcaaatgacagtgtcattgtatactgcagatcagcgccttgccgcggtgcattcggatcacggcgtctcgtgccgccgccgaaaatgcttgagaagatgtcatcgaaaccgaaaccgccgaagtctcccccgccgccgaatccgcctccgaagccctgattagggtcagtatggccgaattgatcatattgagcgcgtttttggtcgtctgagagcgcttcgtatgcttcttttacctctttgaatttttcatctgctccggattctttattgatatcaggatgatatttttttgaaagcttccgataggcttttttgatttcatcctttgaagcgctcttacttactccaagcacttcatagtaatcacgcttactcatctcgcttcactctcccgaatttctcacataaattagattgtatcattttgaattatgttttttcaattccttttatcccgggcaagaaaaaaagtcaaagccaagagatgcctgactttgactttctgtctgttgaatcagaatatgctgtgtgttcttccgctttctgcggaaagaacttattttttcgcttcgtcgtcttttacttcttcgtattccgcatcgacaacgttatcgtccgcttttttgccttcagcgtttgctccgccttcagcctgctgcgcttttgccgcttcttcataaagcttcatggaaagctcttgaacgattgtttgaagctcatcttttttcgctttgatctcttcaatttcgtttttctcgatagctgctttcagcgcgtctttcgcgtcgtttgcttttttcacttgctcttcgtccactttgccttccaggtcttttaatgttttttccgtttggaacacaagctggtcagcttcgttgcggacttcgatttcttcttttctcttcgcatcagcgtcagcgttttcttccgcttcttttaccatgcgttcgatttcgtcatctgaaagacctgaagaagatttgattgtaatgttttgttcttttcctgtgcctaagtctttcgctcttacgtttacgataccgtttttatcaatatcgaaagaaacttcgatttgcggtacgccgcgcggtgcaggcgggatatctgtaagctggaagcggccgagcgttttgttgtcggcagacatcgggcgctcaccttgaagcacgtgaatgtcaacagccgtttggttgtcagctgcagttgagaatacttgagacttgctcgtcggaattgtcgtattgcggtcgatcagtttcgtgaacacgccgcccattgtttcaataccaagagaaagcggtgtaacgtcaagaagtacaacgtcttttacgtctcctgtgatgacgcccccttggatcgcagcaccaagcgctacaacttcatcagggtttacgcctttatgcgcttctttacctgtttcttttttgatcgcttcctgtacggcaggaatacgtgtagatccgccaacaaggataactttgtcgatttcgcttgcagaaagatccgcatcttgaagagcctgacggacaggagccattgtgcgttcaacaagatgagcggaaagctcttcaaatttagcgcgggtcaatgtcagctcaaggtgaagaggacctgcttctcccgctgtgataaatggtaaagaaatttgcgtagatgatacgccggaaaggtcttttttcgctttctcagctgcatctttcaaacgctgaagcgccattttgtcttttgaaagatcaatgccgttttcttttttgaattctgctacgagatgatcgatgatgacttggtcaaagtcgtccccgccaagacggttgtcaccggcagttgaacggacttcaaacacgccgtcgccaagttcaagaacagatacgtcaaacgtaccgccgccaaggtcgtatacaagaatggtttggtcttcgtccgttttatcaagtccgtatgcaagcgctgctgcagtcggttcgttgataatacgctctacttcaagaccggcgattttaccggcatcttttgtcgcttgacgctctgcatcgttgaagtatgccggaaccgtgataacagcttttgaaactgtttcgcccaggtagctttcagcgtatgctttcagatgctgaaggataatagctgacacttcttgaggcgtgtagtcttttccttcgatttctactttatagtcagtacccatatggcgtttgacagacatgattgtgttagggtttgtgatggattggcgttttgccacttcccctacttggcgctcgccgtttttaaatgcaacgactgacggagtagtacggtttccttcagcgttggcgataactgtaggctcgccgccttcaagcactgccacacatgagtttgtcgtacccaagtcaattccgattactttactcactttgaattacctcctgctatgtagttattgattcacttttaccattgaaggacggataacgcgatccttcagtttgtagcctttttgcagttcttcgataacaatattgctgccgaagttttcatcttcgacctgcattacggcttggtgaaggttcggatcaaattcctgaccgacagcttcgatggcttcaacgccttcttttttaagagcgtccatcagctggcggcggaccatttccataccttgcagcaagctttttgtctgctcgctttcagcttctacttgtaaagcccgctcaaagttgtcgagagccggaaggatttccgttacgacgttttgagaacggtatttctgagcagcttccatttcaaggcggctgcgtcgtttatagttttcaaagtctgcttgaacacgcaaaagcttgttttctttttcatcaagcaaaccctgcaattcatcaatttggtgctgaagatcttcttcctgaccagcggtttcttcatgctgttcttctgaagcggcttgttctgtcatttcttcttgttcagctgcttcaacctgttctgcggtttgtttttcttctgacattgtcttcacctccctcaaatgctgtaaaaagatgactgaaaatgattgccaaaattcccttattcatcatacaaacttgtgaatgcttttgacaagtccgaagtcacgtgctgcagcaggctgacgactcttgaataattcatgcgtgtcggcccgatgatggcgattgatccgatctgcttcgtatcaacagtataggtggccgtgattaagctgcagttttccatttcttcgtagtcattttctttcccgattttgattgaaatcccggcttttgatgactgaaacagcttcagaacatcctgctctttttcaattaaggataagagcgagcggacccgttcaatatcgtggaactccggctgattcagcatattgatttttccgccgaaaaacaatttctcaacatgggtcgccggatggaatgtggatcggagcgattcgagaatgctgtcatagttggcaatatgctgccttaaatatgtgacaacctctttaaaaatacgctcattcagttcgtccatcggcacgcccgctaatcgatcgttcaatatattgaccagtttttcaatatcggacaaatccactttagccgggaaattgatggtgcggttctcgacatgccccgtattcgtgacgaggatggcgaccgccttatccggctggatcggaacgatttgaatctgtttaagataattctcgctcagcgtcggcccgaggacaatcgatgtgtagtttgtcagttcggacagtatctgcgctgatttttggactgttttttcaagctcgaagattttttctttaaatatcgagtgaattaaatccagatcggtttttgtcagcttgacgggcgacagcaaatggtcgacataatacctgtaccctttttccgacggaatccgtcctgaggatgaatgggttttttcaataaagcccaaatcctccaagtcagccatctcgtttctgatcgttgcagagctgaatgtaatctcgtctttttttgaaagagttcttgatcctacaggctgcgctgattgtataaaatcattaataatcacttgcaggatcagcagctgacgatttgttaacatcatcatcacccctgttagcactctaggtcagcgagtgctaattctatatcaaaagtaacaaaccaaaagaaaaatgtcaattataactcacccaaaaaagcgccaaaaacctcatttcctaataatttgccctcatgcgtcagcgcaaccgatttttccgtgtcacaaatcaagcccttatcagctaaatttttgagaacatccggaaacagttcatcgactgagcgtccgaatttatcgagaaaagctttcttttgcacgcctgacatttttctgaggccgaggaacatttcttcctcaatctgttcctcccgtgtcacctcgtgcgtgtcccggtaaggcagccctttttcttcgatgagctgcatgtaatgtttcacaggaccggcgttgacggtgcgggtgccactgatatatccgtgagcccctgcgccgaaaccgaaatactcttcattgctccaatacgtcagattatgctgcgactcgtatccaggctttgcaaagttgctgatttcatattggcggatgcttgcttcactcatctgtctcatgaccgtttcatacatctcagcttctttttcctgcgccggaagatgcagtcggcctttttgcattaaattataaaataccgttttcggctctacgatcagcgagtaaacagaatagtgctccgcatcaagcgacaaagccgttttgacggaattgtcaaggtcatcaagcgtctgattcggcaggccgaacattaaatcgagactgatgttgtcgaagccgagggctctcgcccgttcaaaggaagtgaatacgtccttttgtttatgcactctgccgattttttgcaaaagcgcgtcttcaaaggtttgaacaccgaagctcagccgattgacaccggcgtttttcaagattcttaatttttccgaggataaatcatccggatttgcttccacagcaaattctatgagtccgtctgaaggcttcagcacgcggtgaacggaatccatcagtttatccagctggacgggtgagagcgatgtcggcgttcctcccccgataaaaatcgtgcggagatcaggtcggcccgtccgttctatagtatttatcatttccttttcgagtgagtttaagtactcgtcgacaggctggctctgaataaaatatttattgaaatcgcaatagtggcagatgtgctcacaaaacggaatatgaatataagctgatttcatttgaaacaccttcttctttacagaaagaagccgcagtgcgggactgcggcggcttccgttattttttcgggctgtcgtccattttaaggacggccataaacgcttcctgcggcacttcgactgagccgacctgcttcatccggcgttttccttctttttgtttttcaagaagcttccgtttccgcgagatgtctcctccgtaacattttgcaagaacgtttttccgcatggccttaatggttgaacgcgccacgattttctgtccgatcgctgcctgcaccggcacttcgaattgctggcgagggatcagttcttttaatttttcgacgatgacttttccgcgctcgtatgcataatcacggtgcacgataaatgacagcgcatctattttttctgcattcagcataatgtccatcttgacaagtttggacggcttgtagccgatcagctcgtaatcgaaagaagcgtaccctttcgtgctggatttcagctgatcaaaaaattcataaacaatttccgcaagaggcatctcatatacaatgctgacccggttggcgtctaagtactgcatgtcgataaagttgccccgttttccctgacaaagctccataaccgctccgacataatcgttcggcaccatcatagtcgctttgacataaggctcttccacccgctctattttttgcgggtcaggcatgtttgacgggttatcgacgatgatcttttcgccgtccgtcatataaacgtcataaataacgctcggcgcggtcgtaatgagatcaattttaaattcccgttcaatccgctcttgaatgatttccatgtgaagcattcctaaaaagccgcagcggaagccgaaaccgagtgcttgtgacgtctccgcctcgtattgaagggatgagtcgttcaattcgagtttttcaagagcctcgcgcaaatcattatatttagctgtgtcgatcggataaagtccgcagtacaccatcggattgagtttgcggtagcccggaagcgcttctgccgcaggcttaaccgcgcttgtgatcgtatcaccgacacgggtgtcgccgacgtttttaatggcggctgtcaaatagcctacatcaccgactgtcaattcgtcagccggctgcgctttcggcgtgaagacgcctacttcgatgacttcaaactcttttccggtcgccatcattttaattttctggcccggttttaccgttccttccacgactctgatatacgcgacgactcctcggtacgcgtcataaagcgagtcaaagatgagcgctttcagcggagcttccggatctcccgcgggagccggcactttttctacgatctgctctaaaatgtcttcgatgccgatgcccgctttcgctgaagcgaggacggcttctgaagcgtcaaggccgataacgtcctcaacctcttgacgcacacgttctggctctgcgctcggaagatcgattttattaatgacaggaagaatctcaaggtcattatcaagcgccagatagacgttcgccaatgtctgcgcttcaattccctgagccgcatcaacaacgagaatcgcgccttcgcaggcagccaggcttcgcgatacttcatatgtaaagtcgacgtgtccgggcgtgtcgatgagatggaatatatattcttctccgtcttttgctttgtatttcagctgaacggaatttaatttgatggtaattccccgttcgcgttcaaggtccattgaatcaagcaattgttccttcatttcccgctgggtgatcgccgatgttttttctaaaatccgatccgccaaggtcgatttgccgtggtctatatgggcgatgatggagaaattccggattcttgactgcctctctaaacgcttttctttatctgtcacaatctatcactcctactattaaacgcaaaatacactagcttagattatatcaataggattgtaaacattcaattaaaacaagaaagagaaaagcttcctttaaggaatcatccgcttttctcttcatcaatgctatcggttcagtttcaaaacccacttatacatcgcctgcgccgagtccgtcacggtatttgaaagggtttctccggcttttgaaaacaggttgaaggtttccgcctgttccagctgtttttgtttttcttccaaatctttcgccgtaacggtttggcccaaaatggaagcttctttctcctgcccctctccgccgccaagcgtgaacgctccttttaatgaggggtctttgtatcctttcatatcaagcattccgctgtttgcctgctgcatgccgaacaaaacgccgacaaacatgacaatggcgatcagcaggcatttgccggtaaaacggatcattcgaatcacctgatttctattgttttttcttctctcctgattgcgagctgactttttcggcgtcccagtacagttcgctgaatacatcggccatagcgtctgatgcgcgtctcagttcttctaggttgttatccacgcccccgaattccagcagaagcgatctgtcgtttaaatcctggttgtatactccattatctcccggagagccttttgataaaacaccgacgcttaagccggggtattttttctccatcagcttatgaagttcacttgcgagtttatagttttcttcaaaattggcgcttttttttccgacgacgatggcgactctggcatagctttttcctttaatatcggctgtcgtatttttcttgcggcgggaatcccggtgaatatctatggtatattgcaggtttttatttttcgcgagcgcgctttttacgacaggtcttgattcgtcatagcttcgcgcataatttaaaccgtctttgttcaagcgggcctgtatgtcggttttatctacggtcgctcctacgccttgggcttcaagcgcttttccgaacatatctccgacaagcgtgacattggcctttgaatggcgggcattatcaggatttgtttccccttttaacagagggagataggattcggtattgtgagtgtgataaataaagacgactttcttgctgccggtcgaatgttcgggcggcgccgtttcttcttttttcgttttgttttcgatttctgccaggttcacttctttttctttttccatcacctttgacggcggcggagattcagccggcatattcgtataatccgtcccctgccccgccaaaaggatttccgtatcgtattgggcaaatcccggaagctcacgtcccaagaagctccgcgggtcttccagattaatgcttgtcgccagttttaaggaaagccgggatagctgaaatgaatctttttcgggaagttctgacgcgaaataatgattctccatgccaaggaggtgtgcaaacgcgtcacccggaagttctccggcaattccgtgaagagaatcggaagaaagcctcaattcaggacgaagcgatgtaagcacaccggataatacgaaaataacgataaggcttgtcataaacaaaaacatgcccttgagcgcgtttccaccgtttactgcaacgacaatttgacggtttctgcgtttttttctcatgatttgaatccctccagcgcttgtctagtaattactctatgaacaagctagaggaggtagaaccaatttagtgattatacgaacctttattatcttgtgagaccttttcatgaagggcggtgtttaacccgtttgcaagcacgttcgccatatcatcaataaaggtgtcaatctccttcggcgtaaccatcagattatggccgagcggagaaagcacttcatgaatcagctggcgcttttcgttttcgtcaagcgtgccgacaatgccgagaaaggattggcgttccttttccccgggaagatcctcatctgtaagcaccttctttttgccgaagttcattccggcgggcaccagagaccttgacggactgtcatctttcatctctctgccgaaatgctttaatatgtagtccactgtatcgcttgcgatcgttaccgcatcaacgacagtcggtacaccgattgcgatgacggggatgccgagcgtttccttgcttaattcttttctcttattgccgacgcctgatcccggatgaatgcctgtatcagaaaattgaatggtcgtgttcactctttcaacggctcttgccgcaagagcgtctacagcaatcacgaaatccggctttgattctttgatcacaccttgaataatatcgctcgtttcaattcccgttaagcccatcacaccgggggcaagcgcgctgactggcctgtacccttcctgcacattttccggctgaagcctgaacaaatgcctcgtcacaagaaggttttcggttacgagagggccgagcgcatccggcgtcacattccagttgccgagaccgacgatcaaacagcttgcatcctttggaatctttaaagccgacagataggcggaaaattcctcggcaaacacttccgttactttttcctgcatttcagagtcgtgctcccggaccccttgcgcttcgatcgtgacatagcgcccctgctttttgcccgatagctctgcgccttcttttgtaatatctacggttctgactttaatgccgcctttgtcgcgttctttttcaataaacccgtttatttcttttttctgatcagtttgtccgtcttttaccgcctgttttgtttctaccgctaaatccgtccgtatcagaaattgattgacatccagttcgttgtttttcacaaggtagacctccttcaatcatcgtggtacatagtgttgccatttgcaaaacgaatcatgcgaatttacccatcaacgaaaaatactttacatttatattgcaatctaaagttctgtttgatagaatacaatttgttctattgtgaagaagatttaaccttaagacactgtgctacaggttgtatcttaggaggtgaaacacatgccaaacattaaatcagcgattaaacgtacaaaaacaaacaacgaacgccgcgctcataacgcgacaatcaaatctgctatgcgtactgcaatcaaacaagtagaagcttctgttgctaacaacgaagccgataaagcgaaaactgctctttctgaagcagcgaaacgtattgataaagcagtgaaaacaggtcttgtacacaaaaatgccgcagctcgatacaaatcaagacttgcgaaacaagtgaacggactttctgcataatacaaaaacgatcccttttacggggatcgtttttttcattcagtccggagaagctcaaggagaaagagctcaagcaggagctgcttgtcctttttccccgttttcatttcataatccatcactgcgagtttctctataatacgccgaagctcttcttcagaaaaaagcctcgcctgatccatcgccagctttacccggaaggggtgaacctttaagtttgatgcgatttgcttttggccgtatccttgtccggcaaaatactttgtctgcataatcagacggaattgattggcgatcagcgccataattttgatcggctcttcgttttgttttaaaagatcataaaatatttgaaggctttccgtccgttttcggttcacgattttgttgatcagctcaaaaatattctgctccaaacttcttgcgacaagctcccggacatcttcaagcgtgatttcttgtctgtcaccggtataggcggtgagtttttgtatttcctgatatatggaagacaggtggccgtttacgagcagaaccaaatgctcggcagcctctgtatcgatcgttttattttcggatttcgccagattaatcgtaaaatcagtcgtctcctttgcattcagctccttagcttcaatcataagggctttttgcttcagcgccttcgtcagctttttccgctcgtccagcttctcatacggagccacgatcacaaagaccgtataaggcgcaggctctgtcagataagtctccagagcgcctgtattgtgctctattttttctttctttttttcccctgttaaaaaagacggattttttacgatgaccagccgcttctcccccataaacggaaacgtttccgcatcggttatggcctggtcaagcggatcctcttcaagatcaaaaacagacaggttaaaatctttcgtcccctcatcaacgactgcttgtctgatccggctgacagtctcttggagcagataagtttcttttccgtataaacaataaacggagcggacatccccttttttcagggctttccaaacatcaaataccatgatcgtatgacttcctctctttcttgatccccttctatcctaaattgagttcggcaaatagtaaagaggaagctttaaaaaggacagcttcctcatttatattaaacgcctgattcacaagctcccggggctgcttgtaaaaaggcgataatcacaagaacagaaaacgttaccatcacttctagatttttcaaaacaattccagtatacttaaggaagtcaggagggatgaaattgaatgattttgaaaaaaacgttcaaagcaaacgaaatgatgctgttgactcagctgtcggttttgtcgtgtccttcggatttttcgcctttttgttcgtgatggcaacagccatccatcttatcggctcttagccgcattccgggctgctgtcaatcggcagtcttttttacttcctgcgccctggtttcttctatatcatatggagggaagacagaaaacgttccggcgccttttttaaatctgtatcgaatagttccgctgacatcggtgcgaagcacattgacagagtaagctttcaaacgatccagcacttcttcatgcggatgatgataacgattatcttttcctgctgaaatcagtgctgtctccggctgaagctgtttcaaaaaggcgtcactcgtagagcttttgctgccgtgatgaccggccttcaatatatcagccttcagattcggatacgttttcagcacctctgtttcgccgtccgattctaaatctcccgtcaaaagccagctcactctgcctaaaaccgtccaaagcaccagtgacgaatcatttttactccttccgccaggcgactccggagacagcacctgaaactgaagatcaccggctgttatggtatcgccccgttttgcttcagcaacgggaatgttgttttctttcgccatattcaatatttccccatccttcggttccttcacgaatcccacggggacaattaaccgcttcactctatgttttttgattaatactccggcttccccgatatgatcctgatccgcatgggttaaaatcagcgcatccagctttttcaccccttttccgttcaaaaacggaactaaaactttctcaccgatagaatacgggtggtgtttttctttccacgattcttcggaataagcaatcactcctcctgtatcaaccattacggtacctttacggtgcggggcacttataaacagtgagtctccctgcccgatatcaagcatatccgcttctccccaaggactgaaataaggacggaacattatatatgccaaaaccgcaaagaaaaaaagagccgatttcctgagctttaaaaaacctcccttttccaaagctgcaaaaagcgtaaaaacggaaaccgcaagcataagaagcgacagaaagtcaggctttgacgcaatcattgtaaataaatcaacggatgccgcatatgtaatgaaatcatgcacaggcttcatcacaagatcaaacaggtaaaacaaaaattcccccgcctgcctggaaagtaagagaagaagaaaaccgatgacagaaaacggaatgacaaataacgtataaaatggcaccatcaccatattcatcggaaaactgacgagcgaaatctgctgaaaatgatagagaagaaacggcagcgaactgagctccgcaataaatgaagccatcgcaagcccggcgagtctgtttttccctgctttctttaaaatggaggatgacagaattaaagcggcgcttaccgcaaaggaaagctggaagcccgcctgccaaaggaggtaaggatcaaacagcagaagcagcagataagacatggacaatgcagctgaggaatgaatgctgcgtttcaaaagagttccggcgatataaaatcccagcatgagggatgcgcgcagcacagatggggcagccccgcttaacaacgtatacaccggcaaaaaaagcagcaacaacatccccgccttttctcttgtcagtccaattctgataagggcataaaataaccccgccgtaataagaccgacatgcattccggaaatcgccattaaatgaacgactcccaaattttgataagcgctcagtatatcgtcctctatagaaaatctttcacctaaggtcagcgcctcaacaattccggcggaagattcaggtacatgattccgaatgatcgaaatcaaattctttctgatgttcagaagcttaaacagcggctgttcggatttttcgcactgcttaatggaagtaacggaaaatatccagtgaatatgctgggaataaagaaattccttataatcaaaacccccgggaaccgtcgcatgtcggggctgttccagtgagcctgtaaacgtacagcgcatccccggttccagctgttcaatgagtcttttttcttcaagggaccggattttgtacgaagcggcccatttttctttgtcatgggtacggataacggctgacattttcgctccgtcaaccttcggaatgtttatgatgagagcctgttcagtatagctgccggcctgataccgggatacattcgcagcgtcacaaaccgtatacagaaagaaataaagacaaaaagaaacgaggcagacgataaccggtgtgtgctgctttgtttttacgataataaagagaagatacagaaggaaaaagaataggacccagaaggaattagcggcggcagttcccgcggttgcagaaaccgccgccagaggcagaagaaggtatttatatttcatttatacgtagctggtaaacagctcattggcctgttcatgaatttttttcagttcgtcttccttaacccccgcatcagataattgctgaatcagcccggctacaaaagacaatttttcacggtttttcaaatcgatgatcatttcatcaagttcaacctgctccaccttgactccggcttggttgaacagctcttttgcgtaaggctgtgttttgtaatcttcggcataatagacagttttgatgcctgcctgaataatcgatttacagcattgaatacaaggataatgcgtcacataaatctcggcgccctccgtcggcacaccgaacttagagcattgcaaaatcgcattcatctctgcatgtatggtccgctggcaatgattatctattaaaaggcatccttcatcagcgcaatggacgccgcccgcaattgagccgttgtatccgccggcaatcatccgcttgtctctgacaacggttgccccgactgacagtctcggacatgtgcttctcagcgccagcaaatggctttgcgccataaaatattgattccatgagattcgttccacaagtgttccctccaaaagtcttgttgctgttctaagtttacatagttttgagcaaaaccgtcaattcactttaccgtaatggaagtttttatccgctcaaatgacttttctccaaaacctgatacattcatcaaatcttcagcagtctgaaaccgcccattttcttctcggtaggcgataatcgcttccgcttttttctgccccacaccgggaatcgcctgaagttcgtcaagagatgccgtattgatattgacagaagcattctccttttcacctgctgcggttttcgggggattcgcctcttcgccttcactcgggatataaacgatcgtcccgtcctgcagctgctctgctaaattaacattcagttcatccgccttttccttcaggccgccggctttcttaatggcttgcgtcactctgtctcccgccttcatttcataaacgccgggatgtcggaccgctcctttaatatcaatcataatcttatcgtctgcggtgtcttttttgtccgtgacgggcgctgaggctgtttggccgagcacggactgctgtttgacaggctcttctttttcggaacgaaacagcaaaatgcagatcaaaaccgcccctgccgcaagacaaacgccaagaattttcaggtactgcctctgccgctccgtcatcatcactttcgtcatattgcattgcctccccgcataaggtttagaggattaagggaaaaaggaggggaatttcattgaaaataggctttatcggcaccggaaacatgggaacgatcctgattgaatcgcttattgaatcaaacgctgccgatccctcacaaatcaccatcacaaacagaacaatcgaaaaagcattgaaactaaaagaacgtttcagcggcatccatgtcaccgaggatcaggaaaagctcgttcaggaaaatgatatgatattcatttgtgtaaaaccgctggatatatatcctttgctgaagaaactcacaccgcatttacgaaaagatcacattttaatctccattaccagccccgttcaaacggaacagattgaacatgcggttccgtgtcagacggcacgcgtcattccgagcattacgaaccgcgcctttgccggtgtctcgcttgttacattcggcaaaagctgcagtgagtctgcaaaagcggatattcaaacactgatcactcatatttcaaaacctgtagaaatcagcagcggcattacgagggcggcgtcagacattgtcagctgcggacccgcttttatgagttatctcgtacagcgctttattgacgcggcagtggaagaaacggacattacaaaagaagaagccgtgattatgtcgacggaaatgcttgtcggtctcggaaagcttttggaaacagggcattacacccttcccgccttgcaggaaaaagtatgcgtaaaaggcggcgttaccggagaaggactgaaggctctcgaaaacggtgtgcaggatatgttcaaccgtgtctttcagcgtacacatgacaaatacgatgaagatatatctttagtgcaaaagcaatttcacgtgtaaatgagtatgccataaagtgctttatcgtgccaatcgctaaaaatgcattttaaaaaccatcgttccgtttaaacgatggtttttggtttgcctgccgtaaagaaaagacgttcagactctcttgaaggaggacggtctgtaaaatcagccgtcactttcttcagttcaaatccgctctccgcaagcatttgttcatattcttcaatgtaaaatgttttttgctcatgcgtctcgtcataacggtcatatgactgtccgttccatacgaaaaaggacatatcatggatgacagatagctcttcatcaccggcaaagctttgccagatatagctgatctgttcatcttgatccgcatgggtgctgtccggaaaaagctccgtcattttatatggggaatggacgtcaaacagcagcaagccgccctctttcaaaacacgaaaaacacttttgaaggtgctgaagacatcatttttcgtttttaagtaatttaaggaatcacagcagatgacaacggcatcaaactgttcttcaaaaccggaaagctctctcatatcctgctggagaaatagaatcggctttcccgtttttttctgctgggcacagctcagcatgtcttcacttaaatcgattcccgtgacttcgcagcccttttcggcaagcctgacggaaatttctccggttccgcaggcaagatcaagcacccgtcccttttccggaagagccgcttcgatccagtctgcccattcatcatacggcgcatgcgacattaactcgtcatatacgccggcgaagccttggtaaatcatgagttcaagccgagttcaagctctgcgagcggcgcgtcgccccatagcttttcaagattgtaatagcctctttcatctttatggaaaacgtgaacaatgacgtcgccgagatcaactaaaatccagcgggcttcatcaaacccttccatctttttgacatcaatgccgttttcttctgcctgatctttaatttcacgcgcaattgcctgaacctgtttatcagaattcccgtggcagattaaaaagtaatccgctacaagagagattccttccatgtccagcgctaaaatatcctctgtacgtttatcatcgcatgcttttgccgcgatttttaatacggaagcttgattcatttccatattcctcctgtcatttttgagacaccagccagttataggttgcaaacgtctccgggaagaccggctggttttttttcatcagaaatatcattgtatttttcatcgcttgtatgagcgcttcgttcagatctgtttccgccagatggcgcacctcttccactcccggaaaatggcggccgggttcaatgtaatccgccacgtaaatgactttgtctaaaagggtcattccgggacgccctgacgtgtgataacggatcgcatctaagatctcggggtcagtgatccccgcttctttctcagccagatacgcccccacaggagcatgccacagctcggcattgtaatccaagagctcagccggcattttttcccgcacgatgatctgcttcatttcttctttcggccggaatttcgcataatcatgaaaaatagcagccatttccgcttttttcggatctgccccgaaccggcctgcgagaataaccgccgtatctgtcacgccgattgtgtggatatagcgatgctcggtcagctgttctttgacgcaggcaagtgcttcctcacgattcatataaatcattctcctctatatactgcctcacttcatccggcattaagtattgcgtcggtttttttgctttcagacgttctctcagcatcgttgacgaaacgccaaactccggaacgtcagcaaaaagcagcgggtacggggtctcaatatgataccccggacgccgcactccgataaattgaatgagcttgagcagttcgtccagtttgtaccatttcggcagatattcaatcatatccgccccgataataaagaaaagcttgtcgttcgggtgccgctccttcagtaaacggacggtatcataggtataagaaggaccttcccgctccatttccgccagctcaagcttaaagccgggattagagctgatggcaagcctcagcatctccacccggcgccggctgtcggtaaagtcttcattctgcttatgcggggggatttgattcggcataaaccaaacctcatcgagctccgcctgatgaaggacttcattagccatcagaagatgaccgttgtgcggagggtcaaatgtgcccccgaatattccgattttcctcatgtcaaccaccttacggaagctcgatttgtttattttcctttgattccttatacaatacgatcgtatttccgattgtctgcaccaaatgtgcacggctgcctttcacaagggctgccgcgacatcatttttatcgtcttcgcagttttgaagcacactgactttgatcagctctcttgcttccaatgcctctgcaatctgtttcaccatgttttcgttgactccgccttttcctacttgaaaaataggcgttaaatgatgcgcttttgaacgcaaaaaccgtttttgttttcctgttaacattgtgttcctcctagttttccttcaacaattgttctcatcaagccgctgtcaggctcttgttccgtccacagcttgaaagccaaagcggcctgttctacaaacatgccgatgccgtcaagggttgttaagcctcttttttcagcttcttttaaaaacgccgtttgaatcgggttgtatacgatatcacaaacaatggcgcccgttttggcccgttccaatgagagcggcacggcatccgtgttcggatacatgccgacagatgttgtatgaataatgacgtcatattgctcaagctgattttcagcttcttctaatgtgagggcgcgtttctgctgaaaagagggagcggccgcaatcaggctttctgctttttccggcgtgcggttgcaaacgtcaaattgtttcggctctttgcggacaatcgtcgtaaaaatcgctcttgccgcccctcctgctcctatcattaagatggagagctctgatatgggtttgtccaatactttgaccaatgatttataaaatccatctccgtcagtattatacccgatgagcctgtctccctctcttttgacggtatttacggctccgagtactttcgcgctttcatctatttcatccaaatgctccatgatcgcgactttatgcgggactgtgacgttaattccgcagatgccaagcgccttgattccgttaacggcgtccttgaggttgtgaggttctacctgaaacgcaaaatactgcccgttgatgttcttatcttttaaagccgcgttatgaatatcgggtgacattgaatgcccgatcggatttccgattactccgtacaattgtttcatgctccctctccccttctctctatattaatgatcggcggacaaatacgtgtacgcctttcggagcgtatgccgttatttttttatctgcgttctgcaccgtgacccagccgagaccggaaaaaacgatatctgtctttccttctttaatcgtaaacgtgtgggccgtaagctccggaaattcatccaaatgatcttttccgggcggggtgagcagttcacccgcatgcttttcgtataaggcgtcagcattttcaagctttgttctgtgaatcatcaattcattcggcatatagcagacaaacgccgatttatcgcctgaaacataatcaaaacgtgcgagcccgccgaagtaaagcgtttgtttctcattcagctgaaaagtgcgcggcttcagttcttttttcggtgtcagcacctttaagtcacgcttgtccacgtaatgcgccatctggtgatggttaatgattcccggtgtgtcataaagcgcagatccgtcatcaagcgggatttcaattgcatcaagcgtcgtccccggaaattgagaggtagtaataatattctcttcccctgagacctctttaataatccggttgataaacgttgatttcccgacattcgtacagcccaccacatacacatcgcggccttcgcggtaatgttcaatggcgtcaatgacttctttcattccttgtccgcgggaagcgctgattaaaaagacatcaagaggttttaagccgtattctttcgcttcgcgtttcatccattgaacgaggcgttcccgttttacggatttcggaaggatatcggccttattgccgacaagaatgatcggattaccgccgacaaagcggttcagtccgtttatccagcttccgttaaaatcaaaaatatcaacgactttgacaataagagagtcagtatcgccgattgtgtgcaagatatttaaaaagtcatcatccgttaatgaaacatcttgaatttcattgtagtttttcagtctgaagcaacgctggcagatgacattctcttttgtgagggatgcctttggcgcatacccgagaccttgtttatcttcggtctggatcgttactccgcagccgatgcaaacaaccttttccatttctaatcctcccactgaatatggcctttacgtttcaaagaactcaatattctccgttcaatccggcggttaaagcgcgtcatgaccccgtcagaggaagcgacaggcacgacgaggatcgtatgatacccatgtctgtttccgccaagaacgtcagtaagcagctggtcgccaatgaccacacagtcttcttttttcagatccatgctgctgacggctcttttaaaggcgcgccccatcggttttcttgccttataaataaacggtatgccaagcggctccgagaataatttcactcttcgttcattattattggagacgatcgtaactttaatgccgtgctccttcatttcttcgaaccactcgattaatcgaggtgtcgcactcggtctgtcccactccacaagcgtgttgtcaaggtcagtgataatacctttcacattgcgctccttgagcttttccggtgtgatatgaaatatatttttcacaaattcgtcaggtaaaaaaaacttttttaacaaaacccgcacccttcccttttctttctatcatctatatgtcgaaatctgtcagatttaaaaataaagtcggactgagcaaaaaaatttcgacaaaaattgggtttcttcaccagttgtggataaaattacacacattatccactcttattacatccggatttatccaaattataaacaagatactaacaagttatccacttgtgagtgtggataacagaacgattgttcttatttgtatttcatggtagattaaagataacctcaccatgattgaaacgcaaccttcatcatatgcttgcgtctgatgattgattacaattattaaggaggtgccactcccattaattgggtccccggcatgagaaagctttctgatgaattactaatagaatcttatttcaaagccaatgaaatgaatttgagccgtgaatttatcgagttaattgaaaacgaaatcaaaagaagatcgctcggacacattatttccgtttcttcttaaacagaaaaaattttccgggcgaatttcctttttttactcagatgactgatattatatcacttcggttatgcgctttactaccactttcaacaaaaaacacccctaaaatagaggtgtttaagaggacggctgttattatttgaaccaatacagaccgcccagaacgagaaaaacgacgagcaggacgacaaaaaatgcgtaccagtaccccgcattcacccgaggaggcgggcatacaggatattgcggagggaaaccgccgttcatagcatatcgcctccaaaaagatgtttttctacagcctatgatgcaggagcaaaacggcttaggcagctgacagcgtcagcgttccaaaacccgcccattttttatgccttcaattaagattctggccccttttggcgtcatgtgatttccggaaggatcaatcagtccggattggatcagcgcccggtctgtagctttgccgccgtccgcgcgtataaagtgtttccagttatccaccagaggcacttttaactcttttgcaacctgtcttgtaatgccgttataggaattatgccatttcctcgctccgcctttttctttaaaggctgaggccttatatcttgaatagtaatagagatgatgcgttccgtttccttctataaccgggatgcacgtcattaagatcggctttatgccgtgttttcggctttcgtttataaaataagtcaggttttctttaaaccttttctttgatactcgcggctgatctcccgtcaaaatgcccgcatcatttgttccgaacatgataaataaatattggggcttacggtcaatcacgtcgctttgaaagcgcaggcgcgcatcttcagtcgtctggccgcctattcccgcattcacaaccgtaagacggccgcgttccgttgtttttaaaatgtttacccactgctgcgcctttggataatcacgataatcccaattggaaccgcgcgtattgctgtcgccgaacgcgacaacacttttctctttgcctgcggcgcatcccgataacagacaggttatcgtaataaaaagaacagcaaacttcattttctctccccccaaaccttacatcctatggtacacatctcttttgcggctttcaacgcggcgctctctttaatgaatatgaaaagggccggattcctgtccgatcaaatccgaaaccttaacaaatgtgtagccctgttttttcagctggggaatgatttctttcaaagcctcaaccgtctggcgccggtttcctcctccgtcatgcagaagaatgatatctccatccctggcatgtgagacaacatgcctgacgatttttccttttccgggccttttccagtccatcggatcttggttccatgaccacatgatgataaagtagccctcttttaaaatgcctttgaaagccgtatgattcagcgatcctcccggcgggcggaataacttgtccccttccggctgaagcgatctgatatgctgcgcggagctgtgaagctcttttaaaatttctttgcgtttcagccggtgaaaataaacatggttcatcgtatggttgccgatttcatgcccttcttcaatgatgcgctttgccgtaatagggtatttgtctatacggttcccgatacaaaaaaaggttgctttaacattgtgctgtttcaacacgtctaacacagcctccgtatagacaggatggggaccgtcatcgaaggttaaagatagtttctttttttcagaccttatatcccagtacacgtttcccgtcttctccatgtcacttctttttaatgatttcgcatcggcggacacggcagtgagactcgcgaggacgcatatcatgatgatcagatgaaagcatctcaacgtttacacctccagtaaacactactgttaacgtgtccccttttttaaaaatcattctgcacattaagttatgtacatcacccgcttctgctgtaagaagcaggtgatactgatttatgacagcaccgcttccagcttgtcttttgttttcggaccgtaaatcccgtcagcctgcaaaccgttcattgtttgaaaacgttttacggcattggccgttttcggtccgtatattccgtcgattccatgatttttcgcatgtttatcaggataaaaataagcggcggcaagggctctttgcacttgagtcaccttttcgccctttgtataaggggtcgtcagtttaatgattcctgaaggcagcgggtagattttaggcgccttatttgcagagtcgtcagtgccggttatgccttttttaaaggattcccagctgttcagcagcctgtcggggcaattctttcctgaccattttttatggggaacgacgcggtcaagaggtatatgataatctttcatgagctttttaatgagccattgcgcatttttcactgccttatcaaaatcaccgtcagcgttttcacaaatttcaattccgattgacttccgatttcctgtcccatttgttccgtcaccggcatgccagccgttctcattaagcggcaaatgctgataaatctcagaatcatccaccgtaaagtgccagctgacggcagtatccggctgtttcacataatttgcatgcatcttcgcgtctgcgcccttgtccgtgttggacgtattatgaatggtaatatagtccggattcatggcatatcccggccgattgccgtttgatttcggtatcaggtctttttttatggataccattttatcccctcccctattaaataatgcagaaacacgcttatcggacagcctgttttaatagaaggagatagatttgtgctgtatactatttgaaaagaggtgaacgtgcaaatgataaaaaaaggattcagtcttgccgtcatcattgctgtcgtgatgatcggctttatgcaaaaagacgtctggctcggcatgattcggggaggcggaatgtacgccgtccttatgagtatcctgctggttgcagcagacgtattttttccgattgttccattcgccattatcgcggccttaaatggagcggtttttgggattgtaaacggggtgtggattacactgtccggcgcgatgctcggaacaatggcattgttttttctcgtccgttacggattcagagactgggccagaaaaaagctgcgtgcttacccggccgcagcccaatatgaagattcatttcatcagcacgcgtttacggcggtgcttttcgggcggctgattccgattattccgtcgcttgccatgaataccgtctgcgggctgagtaacatacgatggctgatctttttttccgcgtcagcgctcggcaaaattccgaacattgtgatcgtgacggtcgcaggcgcttcatttacaagcaacaaactgctgtctttcgggatttacggaatgtatatgctcgtgttaatggcagtcatttataaaaagtttcccggtcttttaaaaacaacgaaaaaatgaagcgagtaccgccccctattccggcggtacggctcctctcattctgagaacctttccgttcaatttcgaaccgaccgcttccaggtttttctttttgtaaaatgagagggccgttttattgtccggagaaactctgaaatgatattccgaaacaccgttcgttctgaaaaactgattcgcgtattgatggagcttcgttccgcacccccttcccctctgctgctcagtaatatagtaaaggtgcacataaccgattttttgattaccgtacgatttgacggaggcttcaagctgtccgatcggctgcccgttatgaaaaagcagcataaaaccgtcgggaaagcatttgatttgggatgacagccatctgagatattcatccttattaaattgagccgccgtgccaaagctgacgagaaacgaatcttcccgaaatgaaacggccgtctctttatgtttgtttaaattgattgatccgcttgaaatacatcgggtgtcctcctttttgaggccgcaattaagaatgagcataaaacagctgccaacatcagcataacggcagcgcctgtgatgacgatatggcggatggaagaactgactgccgccgctccgaacacggccgttatcaatataatgaagccggcttcaactaatgaataaaagctccccaccctccccatgatgtccaccggaacattcttttgataaaacgtcagaaatcccgtattggcgaatgccaggaaaaaagccagaaagaaaaatccgaaagcagccgtccaaaaaccatcagaaagcgcataaatcatatatccggcagctgtgaataaagagcccattcccatcaataaagaagccggtatttttttattaaacaacacattgacaagcgcccctgcaataacgcccgccccagacacactgacaagaaaaccgtaatcagcatcagtcagctgaagaacctcttttgcaaaagcgacttcaagcgaatcaagcgcagacaacataacggtcatgaccagactgaataaaaaataaatgatcatgacgtttcgcgccgttcggctgaagcgatatacgagcttccagtcttctttgtacactgcaaaagaaagcttctgtctgggagaatgtacatgaggttcattttcaaggtttggcagcatcattgtgataataccggaaagcattaaagctgccgtattcacccaaatcgcaaaaatcggcgtgccgatgataaaaagcagcccagtcgcagccggtccgaggagaaaagcccctgattccagcaacgccctgagtgaattgaattgttttctcctttcggccgggataagcatcgtcacgtacgccatggaacatggacgaaacatcgcattggccatttgaatcaaaaacacgatacaataaacggaaaacagagaccgtgcagtaaacatcagcggcagaacggcaatgaatgcagcccggatgaaatcaagcgacatcatcatattccgtttgttccaccggtcgatgatgctgcccgcccagccatttgtcatcaaaacagccgcgggcctgattaaatagagaatggaaacggcaaaagcagatcccgtttcttttaagacaatgagattaagagacaaaaaataaatccattctccaatgtttgctatcccgattccggttaacaaaagcaccgggtaccgccaagacttccggtttttcatcatatcccccctcaaaaataaaaaaacgccctcaagacaatgaagtcttgaggacgggaaacagcccgctatgccacctcaattcggtttggtgccggccttgccgggtacaaagcttactctgtaacaggagtatctgccgcatcatcctcgttttgcatgattccgatgcgaagctaagaggtttgtttcaacacatccattcatactccttcccagctcccggagctctctgtcatgaatgatatctgcctactcttctcttcagcgctttttgcgtatattcttttcgctcttactttttttaacaatatacaggctcaatcaaaaaaaatcaagaggccttcagaaataaaacctgcctttgattaatttccctgtacagacacagacagcctgactgccacatacagttacatataggcttttgcctacataactttgtggaggtgaggatggtgacaggtgtttttgcagcgctcgggtttattgtgaaagaactcgtgtttttagtatcatacgtgaaaaataatgcctttccacaaccgctctcaaataatgaggagaaaaaatacttagaccttatggctgaaggagatgaacacgcccgcaatatgctgatcgaacataatctccgtttggtcgcccatattgtaaaaaaattcgaaaacacgggagaagacgcagaagatctgatctccatcggtacaatcgggctgattaaaggaattgaaagctattcagcaggaaaaggcacgaagcttgccacctatgccgcacgatgtattgagaatgaaattttaatgcatctgcgcgccttgaaaaaaacgaaaaaagacgtctcccttcacgatccgatcggccaggataaagaagggaatgaaataagcctgatcgatgtcctcaagtcggaaagtgaggatgtgattgacaccattcagctcaacatggagcttgaaaaggtcaaaaaatatatcgacattttagacgaccgcgaaaaagaagtcatcgtcggccgcttcggacttgatttaaaaaaagaaaaaacgcagcgcgagatcgcaaaggagctcggcatttcaaggagctatgtctcccggattgaaaaacgcgcattgatgaagatgtttcatgagttttaccgggcggagaaagagaagcggaaaaaggcgaagggaaagtgagcgaaaagccggatctgacattccggctttttctgttttttattatgtcagtcatggtggcggtgttattaagaaactcttccacactcaatcttccatcattgaacgtacttcctatgaaaaatgattttgaacctcataggaacccttacaagacagggtttttgttgttttttttcattattcatctcaaaaaaaccataaaaataaggagtgacatattagtcatgtctaatatgtatcactccattagttcttgttcaataatcccacccgattgtggaagatcgttattaaaaattttcaatgttagtttgattttcatacatactaataaaatcttatttaaactttacaagacaagctgaattgactatagtctaattagactaaaatattgatgcaaagaagtgaaaaattagatgataaagtcttttttaatgttggggcagtcgaatatggcgggccgtggatttttgaatgaagtagatcctatctataatgaaaaaataaaaatgctgcgcaatggacagtggcagatgatgacagagccgattaattacgaccgtccggtttccggcgttggcctggcggcatcttttgcagatgcatggtcgaaagctcatcccgatgaagaaattggcttgatcccttgtgcggaaggcggcagttcattgaatgactggcatccggaaggcatcctttttcagcatgctttgtccgaagcccgcttcgccctcaggtccagtcaaatttgtggaatcctttggcaccagggtgagagtgacagttatcgttcgctacatgaaacttattacgagaaattaactcttatcatcgagacgctaagaaacgagttgaaacttgatgaggtaccgttgattattggagggcttggtgactttcttgggaagactggttttggacagcacgcgactgaatttcgacaggttaatgaacaattgctgcattttgctaatgaacaacagaattgttattttgttactgcaacaggtttgactgcgaatcctgatggcattcatttagacgcagcttcacaacgcaaattcggttaccgctatttcgaggctttttcgaaaaagcgccatatcctgaaacccatttcgggagaggagcaatcactgaaagtgaatggtgactattctaaaacagaacagatttaccttcatagtatggatttggcttcgggtaaaatcacgtacgcggaatttgaggcgcggatggcgaaggtgatgaaatcataattcccttacttatccttggcttgttaatccaaaaccccggagctcacggctatgaacttctggccttaatggaaaaacgtcattacaaatacattgttaacttcacgaaaggttcattttattacaatctgcagcaacttgaagaaaagtgtttgattgaacagattcagcagaaaccctcaaccagcgggcgtgaaatccgtaactttaaagtcacagaagcgggaagggcagaattcgaaaaattaatgatcaaatacggcaccaaatcggaatatgtgaacctgcaattttatggggcgttactctttgccgatgaattcgacaaaaataaattactggatctgattcaatcacaaatcgaccagactaaagctagaatcgagctccttgatgaatacctgtccatcactcaagaaattcccggcacaatcaattattttcgccgtatgaatgaaaattcccgttcacatcacttggttaatttagagtggttcgaaaaattgaaagcagaaatagagtgactattgcataataaatataaaacctgtgtcgcagatatccagtaacatcattgatacaggttttatactccttctttaattaaaccagtaatagggttgtcaacacttgcccccaacaagagcaagtgaatcatctgctgtgtgttcttctttttcaatccttcgtattaatagtattcaagtaagtcaactgatttttctccttcttccgctattgaacaagcagtgaaggtgaacatcgttctcgacataaactaaaattttttatatacctctgcgtaaacaactttcaattgattgatattaaacccctccaattggacgtttttcctatgaaaaagaccgcgaaaaagaagtgatcgtcggccgcttcgggcttgatttaaaaaaagaaaaaacgcaacgcgggatcgcgaaggagctcggcatttcaaggagctatgtctcccggattgaaaaacgcgcattgatgaagatgtttccggtaactttttttaaagatatttgtttggattcaaaaaattccaaaaatatatttatatactcctagcaacgctcgctttaaccaattattgtaaccccccatgtttacagagctgattaataaactatacgagggataaacggataaagccttccccttctttctgaggagaaaatattaaaaggcggaaagcccttctcgttatgagagggctttttaatacggagaactcaccgaagaacaaatcacttgtctgttgtgggatactgccgaaaataaatcacttcacaacagacaaactgacatttggatttattttctggttcagttatctccatccgttagtttaattagaattcagataatccaagacacgatcaactctttcattgactgagtaatctccttcaatttttaacaatggacaagataaatctgccatccaatgttcgtgtaaagctctacttctaacttccattccagcattatcatataaagaagcccactctaaaaatgtttttgattgttcatatttactgccgccggctaacacttcgtttccataacgctgaaattccctatgccttaatctctcaagccgtatatcttgcggaacccataagaagatgacaaggtcaaaataactttttagatcatcgccccagccgcacactgcgccagaaagaatccatttctcattgattgtcaagtctttttcaagcagctttcttcttttaggaatttctctttttttagtgaatttatctgtccaatagtaatcatcagtatcaagatgcgtatgaggcaaatgctttgataatgcaacacccaatgttgaagttccgactccagaggctcccagtatgtgaatattttttttcatagttccctctccttatgaagcaacgaaactccctgtccgctgcacaaggttcttactattattttaacataaatccccaaaaacctttgctttgatagggaatccagatgcgtgttaaaacccatactgcttacgaaaacagtccttattaaatcgtgatttccctataatatttaacgaatcaaattttagattaccgtctgtaagtttttttcatctcgaggtatatgacctgaaaactgagttttaccgggcggaaaaggagatgcggaagaaatcgaagggaaaataatgtcatagaagcaggtctgaaattcccgcttcttttcattccgctaatcccttaataatcggtgcaggcaatgtccgccggcgcaatatccatcagagtcgccaagctccgtcctttaatggctccatattatttatcatttattaaccatcacacagaatgattaactttctctccgacctattttatatcctcatacactttctcaaaagtctcgatcggcagtgaaaacttggttgttttctcgttacgataattgatcacgatctcaatttgattatttttttgttcaaactcaataagcgcattctcccttttatctctgattgaaatgatacaatttccatttttcttttcctttttcttataaatgtaattcaccttaactctcctttcgttgatcgacaaaaggtttctgaataaggaagctcctcaaaaaaaggatctaaacttttatcaagtttgatccttttccctttttagtcatttctccgtgaacgtttatagacattcatggttaccagccagctcataacgatgattcctgcaaaaagaatcagcatattactgtacaaataagcggaatgatcagcgttaacaggcagcagcatttgatccagcaagcggattgataataaaccgcctgtcatcgcaatgcccgttccctctgataaaaagctcgtaaaatttagcagactcattccgacgccggcttccttttgtttcaaactgccagacacaattgtagatataaccgtttttgtgaaggagagccccccaaaaacaaaaacgattataacggtcatgagccagggtgtggcatctataaaaaaggcagcgattaaaaaactggaagacatcaatacaattccaatggtcagcacatacaaagaacctttccgatcaacaagccatcctccaatgtaaccgaagatgatgacgctcatcgttccgggaaacataatcccgcttccaattgccgcagtacttaaatggtgaacatctttcatcatataaggaaccatagacacaaatcctgctgcagtgccgaatatcagtccgccgcaaaggacgccaatcataaacaagacatttttccccagtgcagggtcaacaaaaggttcttgagttttcctaatatgttttacaaatatcaggaaagctagaatactgatgatcagaaaagatagtctatatgatgtcgtaaacagcataaaaaacacgacacctgcagacattaatataatccccgtcatatcaaagcgcccgctgattctttcttccttttccagcagtttcatcaggaatggaacagtaatcattgttgctgttggaataagcagcaaatatgaccaatgaatataatgagcgatcattccgccaatagctggtccgacaccttcccccattgccaccaaagacccgatcagaccaaatgctttccccctgttttctttcggaatatagcgcactactgcaaccatcacaagagccgggaatgcggcagcaccagccccttgaataaaccgtgccagaatgaggacaggaaagaaagagtgtccgacaaatccaatgatcgatccgaagccatttaccataatcccaaataggagcagctttttgatccccagctgatctgataactttccatacagagcagttccgatggaaaaggttaacataaaggctgtgtttacccagtttgcactcgccggcagtttatgaaaatcgttggcgatatcaggtaatgagacgttcaaaaccatttcatttaatacgctgaaaaatgacagaacacaaagccaaatgaacacttgattgtgccgtaaagttgactgtgaataaggcgtattcacaatttcccctccattaatgagggcagacgcagtttatagggccattgatacgcttccctcttttaattgcaccctgttcttttttttacacttcatacataactccccctgcattgattgatatatcttattatatacagactaaggtatagaacaataaggctcgagtgcgaaaaaaagaaaaatcctcaatccgatattatgaaacattgcgacacacacccgctgtatgaacaagatgaccaaacatcaaatactgttatatttaaaatgtacagtaccaaaaaaccgcaatttcatttgctgttgaaaaattggaataaagcattgcatcgaccgctcctatgacaaagttatttttggcataaaaatgacaagctgaaacataaggttcagcaaatatctcctctgtatatgtccaaacattgttttcaaatgaagggataattctccctgaaacatattgaatcgagtcattttagttatcataataatcaccttcctgcatttactgacctcactttacatcttttgaactgtactgattaattcgtctgcatgtcatggacaccggtttaacaactttaagactaaaacaaaaaagataccaacatcgattggtatcatctattcattcgagcccttacaacaaaagcctatttcggagcgtccaaaccaaatgttatccattcctcttttgccggaccataaatacccggaacagttaaacctgcttgtctcataaggacagtcatttgtcctcggtggtgactttgatgttgaattaaaaacatcaaaagtgaaccatttggcaattgctgaccaataaagttgatacattcttgcagggtattgtcagtccattgcgtttttaacgcctgtacaaatgcattactggcttgatgatagctgtcagctataaactgagcagaagcgggaacaggataatcttcagctggggcatgaaacgttaagttggtgtttgaggtaatgatgtgaatagcagcaacagtatgccaagcaatacggcctaaagtccaatgttgtgaagtgatttcttgtttaagtgattcatcagtcagctgattcagcagtttctgtgtcgcaccggcttcgaactcccaagatttcaaaaaatggtctaaggtttgaaacacaaaaatcctccttccttttttgtttttctatgtatctacagttcaattatagtgtttcgtttagttaaaaagaacagaactttataccaacatgatttaagaaaaaaggctttgcctcagtttcaaatgcttagaaagtttccgctgatggagctcctgatggtgatgtgacagattttaaaaggatataattgaggagtgaatcttcataaagaaaaaacgataaattcctgttacaggacgaacgagatccagaatatgaataagtttgaagataaagaataattaactctgctccagcgtatacaaaaatgcttgttcatacccctgctttctcattgtttctgcagcgctaatattctcataatcgtgtgcatgacgctgctttcctcatttgatttgatgacaaagtgcgccgcatcttttatttcgtcaatggcgttcttgaccgcaaagctgtaggatgccgcttccatcaactctctgtcattgcggccgtctccgaatgccattgtctcatcaggcgaaactcctaataatcgctgcagttcttgtactgttgttcctttatgtattccgatatttgaaatgtcgatccaggtatcttctgatgctacgatataaaactggtgaaaaaattcatgcagcttttctctcgtttccgggcagttgccgtgagggtcatgaaccgtaattttgataaagtcgtcttttatctcagtaaaatcagctattttcgttacatgtgcataagaggcatttacatatctcatttcactttcagacaagttttcttttaccatcgcgcctttttttgtgcatgcaataatgctgtgcccgcagctgattttttctaaagcctctataattgacagtcccgctttattgctgatcaaagattcatatacaaatttgccgttctttttcatacgtgtggcactgtctcctaaaatccaaaaatctttcgcatcttctccgaacaacgcttcaaccctttcacactgctttccggtacagatggcgaaggcgacacgctgttcctccattactttttttgtcttttcaaataacgttctgtcaaagctgccttgattatttaaaaacgtgccgtctaaatccgtaatgactaatttaatcatcgttcagcacctccgcagttgaaccctgtctctttcagacaaaaggtttttcatattttagaatggaatcaatcgcgtttaagaccccttcttcgttatttgattgcgtgatatgcgcggcagcctgtttaatgctttcttgagcgttatccattgcgactccgtatttcacagcggacaccatctccaggtcattaccgctgtctccaaaggccgcgcattcttcattattgattccccattgttcctgaagaagctgaatcccgcttgctttatgaagcccgggtatgatcagatctatgtcaccgtgtccgcttgatacaggcgtcacaaaagatccgatggtgcttttcaaatggctcagcagtgcggaacaatgttcggcgggaaagctgacggaaaatttaaagatgtcatcattgatgttttcaaaatgcggcaccctttttaacacataataatacttactggcatgcagatattcatcttcactggcattttcatgaatatacgcgctttttttcccgcagacaatgacgtttttcacttcatactgctctaaagcacggattactgcttttattgtgtcttcagacattttacccgcgaataattcttttccggcattcacgacgagagcgccattttcggcaacgaaagcaatttcattcccgatttccggaaagaaggatataagctgcgcatattggtttccgctcgctacggcaaaatgaattccccgtgcttttaattcacgatactggttcataaaacgctctttgttatatgccatttcatcattcagaaacgttccgtccatatcaaccgctatcagtttaatactcatatcgtcctccttttttcagccgctcccattcaaataatgcgtatgaacgaattatatccgcagttgatccgtgacgtaaacgtttgacgacgccttgttttgaatgacacaaaaagtgatttgtcacatgaatataacactatgtaatatgttacgattagatgtacggtcactattctcataaaaaggagaatccccctgcatgttcacacacgaaatgattgcttcatttaacgagcttgaaacttctttatacaattacatctgccaaaacagcgagaaagccgtctatatgcgaatccgtgaattggcagatgaaacccacgtatctacggcttctatattacgtttctgcaaaaaaataaactgcgaaggattttcggagtttaaggtcaagctcaaaatgtatgctgaagctgataaaaaaacaactttaaagagctcccatcattccgttaccgagttttttgaaagaacagtaagcggtgacatggaagaaaagctgaaggaagcagccgcccttgtggccgatgcagaaaacgtcatttttatcggagtgggcagttcaggaattcttgccgaatacggagccagatatttttcatgcttagggaaactttcaatgtatattaaagatccttactttccggtccattcccatttccgccataacagcataacaatcgctctgtcggtttcaggtgaaggccattctacggtgactcacctgaatcagctgaagcaagaaggcagccgggtcatcagtattacaaatcataaacattcaaccattgccaaaatgtccgatgtgaatctgtcatattacgtgacggaagaatgggttgaaaatgcgaatatcaccacccaaatccccgttatgtacatacttgaatctatggctcgggaaatatacaaattgagagattaaatcttgagcaccgatgcgctatgggaatctttcgtggttaatcatcatgaaacatatttagctgccgacacttccgtaaataccgttaagaaacccctctctgatggcagagaagggttttgaaaattacagatgagacacgatacattctgaatgtcccgtaagtttatattctcccaaaccggaaggcaggagaatatgatcaccttttttaaagtgatgttcttgctcgccggtaaccatcattcctgcgccttcgattacactgacaagaaggaagggatgattctggaatagatttgcttcaccttttacatcccacttttcgactgaaaaataaggacattctattaatatagctgcgagcagatcatccgtttgtttatattgaacagtcggccgttcacggaatgatggaacgtctatgacttctgcacttttttccaaatggagctcgcgcggcctgccgtctgcatcctttcttccgtaatcatataatctgtaagtcgtatctgaattttgctgcgtttctaaaatgagtgtgcccttcccgatcgcgtgaactgtgccgcttggaacaaagaagaagtctcccggctttaccttaactctgttcaggagcctgtcccattctccgcgctcaatcatggataccagctcttcttttgttgttgcattgtggccgaaaataatctccgcatctttttcacaatcaatgatataccagcattcggtttttccaagttctccgttctcgtgcattttggcaaagtcatcattcggatgcacctgaaccgacaggtcttgggctgcatctaaaatttttgtaagaagaggaaaacggtccccttcaaggtatccgaataaatctctgtgatgctcccataattcaccgagcgtacatcctttataccttccgttttgcactgtgctctgcccattttgatgagcggcgaatgcccagcactcccctgtccgctctgacggaatattatagtgaaaagcacgcaaggcggtgcctccccacattctttctttgaaaaccggtttgaaaaatatcggttcaattgacatgatcatcccccgctttattcgatttcatccagaagctcaaacgcctcttcttttgtctgtacggagagcagccttttccgatagttgtcatccatcagttttcgggataacatctgcaatattttcaaatgctgatttccgccgctttctttcggtacggcaatcataaaaatcagttttgcatcggatccatccaggctgttccagtcaacacctgaacgctttatcccgaatgcgacactcggtgttctgacggcttcagactttccgtgcggaattgcgatattcatacctatcgctgtggttccctgctgttcacggctcaaaattgcttgtttaaatccgctgtcagaaagcagcatgcctttacgggacaatttctgaatcatttcatcgataatgtcatccctggtttctccggttaaatgcggttcaatcaggtctgtgctgataatgtcagttaatttgctgatgtcagtcatcccgcctttttgactggcctgagattgttcctcggtttcttttgccgctgcagctgtatttggttcggcagccggcggagcttccccgggcacgggggatttcgccatatcttttttcagtacattaaccaacagagcggtgacaagagaacctgctgttacagcgataaaaaacattaatacatgatcaactgccccaagcacggcaactatagggccgccgtgtgccactctgtctcccacatggccgatcatcgcgatcaccgagccggtcatagaacccgccataatactcgggattacacgaagggggtcttgggctgcaaatggaatagctccttccgtgataccgaaaaggcccattgtaaatgaagcctttcccatttctctttctgatgcggcgaattttctttttcctaaaaacgtcgcaattccaagccctatcggcggtatacagatggcaacggcaatcggccccataatttcataatttccttctccgatcattgccgatccgaaaagaaacgccaccttgtttacgggaccgcccatatcaaaggagatcatcgctcccaaaatcaatgccaggagaattgagctcgaacctttcattcccgccagccaagccgttaaagatgcgaaaatttgagctacgggggcaccgatcaaaaatacaaacgccaaaccgacaatcagtgaagcaaacaccggaataataatgatcggcataatcggctggatagcttttgggactttacattttttgattccaagcgccgcataccccgccaaaaacccggcaatgattcctccgagaaatcctgcgccgcttgcgctgtcgtaaaagcttccggatgccgcaatatatccgccgatcattccggggaccagccctggcttatcggcgatgctgaacgcgatatatccggctaaaatcgggatcatgaatgaaaaagaagcactgccgatctgttcaatcgttttccaaaaagactcatccggaatgactaagccctttggtgttttttctcctccaagcgttaatgcaaccgctatcaataaaccgccgactacaataaaggggaccataaaagaaacgccgttcattaaatggcggtaaatcgggttttgtttttttccctgctgacttccagattcagcttttgaagctgattgatagacgggcacttcaccgctcagtgctttttgaattaattcttccggtttgcggatgccgtcctgaactccgacagcgagcagcttttttcctgtgaaccggtctttattcaccgaacgatccgcagcgataatgattgcgtctgcttcccggatgtcctcttcagtcagcttattttccaccccgattccgccctgggtttccactttgatctgaacgcctaatctgccggctgctttttgcaaattttcggcagccatatacgtatgggcaatgccgttcggacatgatgtaatcgctaacagtttcatataaatcctcctctgccgtttgaatatcaagatcttgtctcaactttatactgaattcataccttaattagcgcgtttttttaccataagttccggaaataacggcatttttccctataaacagaaaaaaagcagggagccattccctgcttttaatagtttaaataagataaaaacgtcatcacatttttttcttccgtcagtttttgaatcaatgccggctgctcgctgagataggaaagctcactgaataattgctttaccatgttttgatcctcatgtttgacggcaagcataaaaacgagcgacactttttccgtcccccattcaatcggctcttttaaagtggcgattgcaatggctgattgtttgatatatttggagttagcgtgaggaatggcaatacccgccccgatatttgtcgccgacattttttctctcattactgcatgaatgccatactctttttctacatagcctttctcatacaaagcacgtgccagctgttcaatgacctgatagcggtgctctgtctcttgctgtaaaaaaacgagaaacggagtcgtatcattcagcattttgaacgttttttgctcccggcggtgcgatgtatcaagctgtccaataaatgcgctgagctttttttcatcagcaggctccaaaagcggtgaaacgacaatatgagggttcgttacatttccaagttctatcgtagaaatgacgaaatctatctctttatgctttttgatatactctgccagctccgcttttgcgatgcagtctattacggtaatgtcatgaaatttccgttcaattttagtccgcagcaattgtgacataccaatgcccatatggcagacgatgatcgcccttttatggctgtcactgcttcggcgcagacgctcgatcgctgcctgaaaatgcagcgtcaaatatgccgcctcttcttcaggaatataaagatcaaatgtttgattgatgtcttccaagacgtcgatgataagatgaaacaaataagggtacatttttttgatgtcgttaagcatggggtttgaaacagagagatcatagctcagccgcttcagcaccggatcgagatggatgttcaatccgttgatcaattcttggtctttatggaaatccagcattttcagctctgaaacacgattgattaaatgcctgacgactttgggaagctcggaatcttcaagatcaagcttcttttcttgctgcaatggatagcggactttcccgcctataatatgtaaagttaaatagacggcttcttcctcaggaaaccggatggcaaataccggctcaagccgttttaaacaagcccgtgtccattcatattctttcttcttttttactgcgtccagctgtcttgcagaaatcgcgatcggctgcttcattttgatccggcggattgtcagcaatgtatgcagcagcaaactttcaaatgtttcatccgtgaaatagatagaatgggttttttgtaataatttaatttcttttctcacaaaatccgcttcatggcttaagaacttactttttataaattggcttgtaaactccgtattatcagtcaaatccgaaattcgcgccaatgcttttcttttatttttttcgtccccttcaatctttaatccgaggcgctgtttagaaaccagcgtgaggccaaatcgcttcagccacttttcaaccgcatttacatcctttttaatggatgctctgttcacaaagtgctgcgcggctaattcttttgcagaaacaggctttgaattcattaataaatcataagcaatgtgaagtattctttcttcatcggtcttatgcctgcaagtgaaatgctcattatacatttgccggcttaaccatgacctttcctgttctgatatatgtaaatagacgcctaatccgggttttcggatcagctgagcgtgagaatgttcattcaggaaatcctcaatcgttttcaaatcattcctgatcgtcttttcagaacatcggaccctgtctgcgaaatcttgcacaactaagcagtcatcaggttcagataacaacagatacaaaatctctttctgtcttgaattcatgtctttcatctgtttttctatccttcctgtccgtttccgcttgaacaattgtgatagtataaatatactgcgcatacgaaaccgtttacattatatagcggaacaaaagagtaaaaagttttgttttttaccgcagcttccggaaaaatcatgttttatacagtcattggacgacaaaacaccaatcgtttttaaacgattggtgtcggcagtgaaaatctgctgttacagccaaaatgtttctccgagcgctaatgctttcagcttttgcggatgtaacgcaagacgggtccattccctgtgcagtctgcttaatgcttccggtcctgtatcatcagcaagccggaatgctccgtaatgcatgggaatgaagctgtcagccttcagctccaaaaacgctttcacggcgtcttccggattgatatgtgacactttcataaaccattccggttcgtacgctccgatcggcatcagagccgccttaatatgaaacctttctccgatttctttgaaaccatcgaaatagcctgtatctcctgcaaaatagatggattcgccgttttcgctttcaatgacccaccctccccaatgagaggtatcggtatcccagagcgttctccgtgtccagtgctgggccggaacaaatgatatgttcactccccgcacctcaaaacgatcccaccaattcatttcatagacctttttgcagcctttttttaacaacagctttttcagtcccgctggcacgtaaaaatccgggtttcctcgcagtttttttatactcggaaaatcaagatggtcataatgcccgtgtgaaatgagcacggcatcaatatcaggcagttcgctcaactcatatcccggctctgtcagccgtttttgaaaacccatccgccgcgcccatacagggtcggtcatgatgttaagcccctgtgtttggatcagaaatgaggaatggccgatccatgtaatggccgtttccgtgcgattgacggcaacctcgtgaacatccctattggccgctttcggaatgtgctcgcttaaatcttttattttctctcttcgttctttcatccatctcaacatgtccctgaatccattttcattcttcacgccattcaagttttcgtatctttttttcattatcattctcccttgaaacgtgtatttcactggatttatcgggcatttatacaatatctgcaaatgctgcccggcttgcttcggctaaatgttgaggcgctaatttcagctgcattccgattttccccgcactgacaatcataaactccagtgtttcggaggatttatcaataaaagtcggaaaccattttttcatgccgatcggggagcagccgcctcgcatatagccggtcacgcctaaaaggtccttcacggcaatcatttccactttcttctcacccactgcctttgcagcctttttcagatccagttcttttgaaacgggaacaacaaaaacgtaataacgttctgttcctgccgaggccactaaggttttataaacattttcggcagaatatccgattttctccgaaacggaaaggccgtctgcgggctgtcccccttctgttttgtaacctaaaagctcatagggaatgttttgctgttcaatgatacggacagcatttgttttaaccgtttttttcgccatggtgttcctccgttatccgtatttctttctgctttatatcaatagtaacaccagtttcgtcacctcttctactgacacgtatttgcaatgctggattttcagaagaaagatgttacaaaggtagtgaatgatcattcgctcaaaaagaagggattctctttgctgttttaaaaaaagaatgcttttgggaagatcaatgacattcatttggctaacgggccgatacagtttctgtcggtgaaatggaatgtgtacagttgatttatatgtaagcacaaaaacaaaggcagggatgccggctgaagaacttcatcagcagctgtttccctgcaagtatcccattacatttttttcgaagggcaatgggatttaaagcatattgtgacttcgattttacgagactgacggcgcatttcgtgttttgtaatactcaagtgcaaactgtttaaaacgctccgcagccggagagagatcatggttttttaactgggctaacgcaatggtgcgttcgcattggtaatctgccaccggaagaaaaacgaccggaaaatattgatgctccgcggttttcggcagcactgcagctccaaggccggcggcggtcagccctaatatggtcgatacttcctccccttcaaatgcgagatgcgggtgtatattcaaatcccggcacatcagatcaaacatatacctcagcccgtatcccggtttaaatccgacaaaatcctcgtcctgcatttctttcatttgaatgctttttttccctgcaagcgggtgagtttcaggaagcaccgcataaagaggctctttctccagcaccgtccattgtaaaagctcgctgggaagcggcggtgagctgagacagatatccgcatctcccgtttccaccattttgcgaagcgtttcatttgcgccttggtagagcctgaaagtcacgtttggatattgctttttaaattcggcaatcagctgaggcattaagcgcaaaccgagcgtatgaagaaatgatacggatatttcgccgtgctccaggctcatattctttttcacttgttcaacgccttcatttaaagcgcgtctcgcttgttttgcttttagtaagaactgctctccgtgccttgtcagccggactgctttcgtctctctgtaaaataacggcgcgcctaattcttcttcgagcctgataatcgatcggcttaatgccggctgagaaatcatcctttctttggccgcatttgtgaaatgctgatgttttgccgccgcaatgaagttgtcaatttgatgaagctccatttctccttctccccttctttcataacctacacgcattaattccatagttattataaattagacacattgaaatgaaaagcgtacgatacatatataaccaacagtgagaaaagagggacattcatgacgtttatacagcctcatacaaaggcttacagaaaggccagcctggctctgtttatcagcggcttcgtgacattcgccaccctttacacgacacagccgcttttgcctttgttttcggaagagtttcatatttccgctgcggctgcgagcttaactttatccatctcaacagccgttttggcattttcattattggccgccgcttcgttatctgacgatttcggcagaaaaaaattaatggtgctttcattaacagccacttctgttttaggtctgttaacagcattcagtccggcttttccggcgcttttggcgatgaggggtctgctcggtatttttctggcgggcgttccggctgtcgccatgacgtatgtaggcgaggagtttgatccgaagggcctcgggaaaatgatgggcctgtatatcagcggcacaagcatcggaggaatgagcggcaggctgttaacggggcttctgaccgatttattcggctggcggccggcgcttgccatcatcggtattctttctattgtattaagctatttgttttggcgcttgcttccggctccgcgtcattcatctcagcggcatgcgggcttaaaagcggcatgtaaggaatacggagctgtcatacaccgtaaacggctgcttttgttaatttctctggggtttatattaatggggagttttgtcacattatataattatatcggttttcatttaatggccgctccttatcatttgtcgcagactgtgatcggttttatttttattgtctacctcgcgggaacgttcagctcagtctatatggggaaaaaagcggacctttacggaagcgcaaaaatgataaagattgcgatttttgttatgctggccggcgcagcggtgacacttctgcctcagcttgcacttaaaatcgcggggattgccgtctttaccttcgggttcttcggcgcacattcgattgcaagcgcctgggtcggccgcgcagccggtaaccatcgcgcacaagcctcttcattatatctgcttgcatattatatcggttcaagcgtggctggttcttgcggcggtttcttttggacgcattttcattggatcggcatcatttcttttatttcggttttattgctgttgtcttatccggttttatttttggcggaattaaaaaaaagaaaacatagccgcctgcatataaattaataaaaacattaaatgtttgtgtcttttgtccgataataaaaataaggccggcacgatactccctataactattccttttgattcagtagatttcaaatatcgtgccggctttcttccattatatgacggtcatcagttgtgacctcacgcttctgttacacacctgcccacacatctttcgcatatcttccttccgcctgcagctgttcaagccaactcaaggaaactttcgaatcagtgttatgcaccttttcatacgcctgcagcaggacattttccacggccggagccattttgcttccgtcaccgcatatatagagatggccgccttggtcaagaagcgcaataatctgtgcggcctcacgaagcaggacatcctgtacgtatactttacagtcctgatctaaccttgaatacgcccgatgcacggtgacaaggcctgttttctccgcctgatcgaattcatctttgtagagatcatcttcttcaggatgtctgcagccaaagtataaatgagcttcccccaggctgttaccggacattttttcggcagcccgcgcctggataaatcccctgaacggcgcgattccagtgcccgctccgaccataatgagaggcgttttcgtattttcaggcagtgcaaaaccggattgcggtgagcggatgaaacagacggcatgatcgccattctgtaatccggctaagtagttcgaagcaacaccgcgatattctccccggccgctccaagccggagccgttacaacgccgactgtgatactgagttccccgctgtttgccttcggtgagcttgagattgaataatagcgcgcctttaaggacggcaaaagttctaaaaagcgctcgaacggcaattcacatgccggataatcttccagcagatccagcatggtcattcgttttttcagcacgttttctttatatgccgtttcatcagaataaagatgctccaattctttttggtgcggcgggcacacggtatgtgcggcaagttctcgaagctgggctctcgtggccggttcctgcagttctacatatgacgccaaaagctccagtgcattaaccggccggtccatcggcagatgaggtaaatgccgtccgctgattttaaagtgctgattcggatcgagagcgaaccggtgaatgacgcggctgatcagttccccgctgttttgcggaagcaccccgagatggtctccttcctgataagtttctgtttccgggagacgcagctcaatgtgccggactgatcgcgtgctgctttcggtatgaagctctttgtttgtgatgacttccgcctcaaacgctttgtacgttttggcaatcggcgtctcagctgcttcacttacatattctattgatagctgtgatttgttttgctgttcgggagcggcttctatatgaaaagccttgatgatgtcctgccaaaatgaatcttcccaagcttcctgactgtactcaaaatcatcggcattgtcaccctctccgatagaggtaagccgtgttgctcctttttcttcaagcactttgtctataagacggggaatcttctggtaggtggcggcccaattgcggtctccgcagccgaagacggcgtaagaaacaccctttaattcctgatcttcaagagtttccatccacttgacaaaacccgccgcgttatcaggcggcgccccgttgtaagaagccgttacaatcacgacagcgccttttacaggcaatttcccggcataatcatcgagcggcccggtttcagttgaaaagcctttgcttcttccgatgtcagccagctcttccgcaattccttccgcagttcctaaatttgatccgtaaaggatgagaagcggggttccgtgggacggtatttctttcgtttcttctttgtgatcgcttccttcagctttatggttctgtgcggtctgccgattggacacgtccttgtttttcacccggattttaaaatcgccgggcttaatggttaaagcttctttaatcgtaagctcataatcagaatgatcaatcagttcaaaatgcttaaggacaagaccgagcaccatcgtcgcttcctgaagggcaaactgcatcccgatgcaggcgcgctgtccgtttccgaacggcttatacgcatcagccggaatggccgcgggatcactgaacctttcagggcggaataactcggcatcttctccccacgcgcttttatcacggtgcagctgcggagtcagaatcgtcacgggctgtcctttctcaatcggatatttcccgccgagaaccgtatcttccttcgcgtacagagaaaatgccggggcagtcggataaagccgcaatgtttcgtttaacaccatgcggatataggtcagctgctgaatctgcttatattcaggggtttctcccgtcagcacccgttcggcttcctgaacggctttttccaatttatctttatttttcagcaggcagtatatcgcaaaagaaagcagcccgcttgtcgtttcatgcccagcgatcaaaaaggtaataatttgatagcggatattttcatcatccagcctttcacccgttacagggtctttggcttcaagcatcaatgccaaaagatcagacagattctcatccggattttccctccgctcagcaatgatccggtctacaagcgcattcatctcttcaatatcctgctggaactgatgtctcgttttgatcatcagcttgtcctgcaggctgtgccgttgagattggcgcatggcctcctgcagcgcacgaagcatgcttgtgataaaaggatgctgtgtgtcgcggtaaaagctgttaaagcggtaatgaaatccgcacaggccgatggtatccagcgtcaggcgcgtcatatcttcagcgacgtcaatttcttcattcggatttaatctgctccacttctgcacgagctgcatggcaatatcaagcatcattgaatgatagcctttcattgctttctgactgaagctcggcaataaaatccgatgcgctttctgccaattcttttcgtttgtccagctcgtaaataatccgtcaccgccaaattcacggactttcagcaaagctttgccgaggtttttgtcaaatcgcttctcatcacagacttctgctgcgagctcgcggcctgatacgaagaccccgacagagctcgggaattcaaaacgaaagatcgggccgtattcctccgctattttccaaagcgattgtgaaagcttttctttttccaagtgagggagatttttcagagggccgtatgttttcggctgcggtattgcgcttagctgtttcatatagatcttccttccttcggcgaataattaatgagttctgatggcatcccaagagcattgctccaattctttcagaaacggtttcgttatctcgacgcttcccgcccggacaagctgatagagtttaagatatgccccgagcaaaatcgccatcagcacattggacggcaggctgcggagcacgccttcagacttgccgcgctgaaaaaagacgtcaagcatctgtgttaattcatcaagaagcttacggctcgtttcattcagaaagtaggcgtccttattcgtttcaagaaaaaacaatgcatactcgctttcctttgtaaaatcaatcagacaataaaaaagatgatgaaacccttctcttacagatatttttgaaaaatcggttttgacctttttcataaaacgctgggcgctttcctgatacagcacatttacaagtgattctttactgtcaaagtaacggtaaatggtgccggttccgacatccgcctgagcggcaatcatcggaattgtcgtcgcgtcaaatcctctttcggtaaacaaagtaagcgacgctttcataatgagttcaaccttgtttgaagctgtcatccaatcccctttcaaaagcggaatgaatattcattccgtttgttcaaattttaaaatgtacggacatctgataaccattgtataagaaaaaaactttttttaatataaaatatgtgtgaaataaccgaaaataaggaaaaatgcccaatttaacaaaaagagctgcagtgacttaagcagctctttttatttcccgagaaatattctatttaatggcagtaataaaatggaatgaatctctgctgacaactgaaatgtctctgaaatgctgatcacgcagcacctgaatcacatcattttcactcatccgcgaaggcttcaaaacgatgtaaaaacacccgtcaatctgaagaacgcggtacacttctttacatgcaatccggtaatcgctgactgtttcagcagtatgtaaagagaagactttatgaaagctgcggtcgtggaacggaatgctttcaggccgcccctgctgaatgtttccgagcccggccttaatggccgaacggtttgcgcgctgtgttttccgtattttacgtttagatctttctatacttttaagactgcccttttcaagctgtccgatgatttgtttaaacattgagccgtttcctgttccgatttccagaatgcggtcgtattcctgtatatccatcatgatttgtcgaatgaccggttgtgccggttctgatttagcaaagtatttcgcgcgcattcgttttaatgctgaagatgtatgttgcaacattgtataacacccgcttttctattcctgtgatttattattcagaaataatattacctcctattagtacgaggtgctaactagacgcagttctcttcatcaacgtttcgatttatttgaaatttattttagatttcataaaaaaaagacggaaaacgtatgttttccgtctgctctagtaccaataatacggtgcgatatatcttgtctgccgggaaagggccgccattctctgacggcggtacgggttgccgtagccgtgtttaaatgaatggggcattgacgcatacccgtgtccaatggatggaattctattctgaccgccctgcatgctatcacccgcttaccagtttttctttaccatggtatgcaggccgtctgcgccgtgacagaaaaattttcgctaaacctggtccttctccatagtgtaatgattcagcagttcaattctgaacatgatgatctcctccttctcctccattttggctcttcgtgttcattcagttcatataaaaatgtttcagctgacgttctttcgcttcattgtaaaactcttcgacctgttgttctcgttcgtactcttccgcacttttaaaacgctttgaaatggtcagtgttaaaaagaaaagattgatggtcattatcgctcaccccctttcaatatccgcacaagcgaaaataacccgcagcaaacttcagatgcgctgcgggcagactaaatccgcagacaaaagaagccgatgcttctttccctgcggggagctgcgaatgtcctgatactccgaaattaacgtgcttgacaggcagaggttaaggaaggacacgaactcttccacaggctgaatcgattcaattttggattttgcttaccgtttaacattgtcatgtgactcaacctccctttgcttttttcttactttgtaagtatatccaccgacttccaatttgtaaacatttttttcaagatttggacggaaaatgtgcttgaattccgctataattgtccatgttttccggcatctttcttacctcaggacactcttttcattccttgtttattctgatccttttttgaatatgcaataaaataaataaggccgacaaacactgcgccgccgatcacattcccgataaaggccggaatgagattaagaatcagatccccccatgaaaaagagcctgcaaaaattgcggccggaatgataaacatattcgcgacaacgtgctgaaaaccaattgcgacaaacgccattatcggaaaccatatacccgcgattttaccggctccgtcttctgcgccgaaagaaagccaaacggctaaacagacaagccagttgcagccaatcgccgaaacaatgacttttccaaacggcatatccaatttgccttgtgcgactgcaatcgttttttccaaatacgggcctgtttcggttaatccgactatatgtccgaaaaagtaagcgacaaacagcgcgccgacaagattcatcagcgtcacgatgacccagtttttcactaatgaaccggctgatattcttctggaaaacagcgccatggatactgacatcatatttcccgtaatcagctccgccccggcaagaacgacgagcaccagtccgacaggaaacacggccgcgccgattaaactcgacaaactgccccattctttcggaagatctccgatgacacgaatatcaagcaaataaccgagcgcgataaacgctcctcccaaaaatcctagtacaaccaatgctgaaagcggtgaatgcactttttttacccctgcttcgaccgcaagctccgctatttcgtccggtttacgaaacgccataataacccctccatttatcaattcatccggcagtttcaaaaggcgcccaacaaaaaaggcagcattcaaataacccgtctgaaaacggggattgaatgctgcctaacttgtatgcatacccatacaacaatatcaagcagaataaaaatatgcgttatagaacatgtacagatcatgcacacattccataaaaaatcgtcctttagccactgctggcagttcatatcatatcaaatgtgacaatttcgtgtcaattaaatattatcagttcttgatttcttctttatgctcctcaatggagcggtcaaatacaaacacggatacagcaatattttcctctattttaatatctgaaaacaggtgcacgagctttgctccgataagctcttccattccgtcaggcgtttgttttgaatacagctcctgaattaagctggtccgcgcggcgtgaaccatttcccttccttcaggcgtgcgtgcgataaactgctcacttgcgcttaaattgccgtaaagcgtagataccgccatgttatctacaaagacggtgtgaattcgttccggcccttttccaaataattctttgcgcaatttccggataatatcgttaaattcatgaatctttttagacatattgtccccctccgattttagcctatgaaagacattcccggttcccctttgtgacatttcacctggttaaagttttcctttcgtattgtattataataaatatcaccttataataaaagcagtgaagatggattcgtaataggaaacgtgttatgagtctatcgttttatacagataggattggtctgttagtaagacttgctagtgaactattccgccatgcgtatttttaccgatctccggacaggaggccggtatctatgtgcatggcttttttcgagtttaaaagatggaggggaattggaagtgacagacgttcagtctatccgtgtcaaaattgacggcacagagtatgaagcaccagaggggactaagattttagatattttaaatcaaaacggaattgagattccgcaaatatgccatgtacctgaagtagatccgattcaaacatgtgacacctgtattgttgaagtaaacgggaaattgcagcgctcttgttttacggctgcagaaaatggaatgtccatctcgcttacatcaggtagggtaaaagaagctcagacggaggccatggaccgcctgctcgagaatcacctgctttactgtacggtatgcgataacaacaacggaaactgcacactgcataatacagcggaaatgatggggattgagcatcagaaatatccgtatacgccgaaagacgattcaaagtgcgcggttgatatgtctcatccgttttaccgctatgatccgaaccaatgcatcgcctgcggccaatgtgttgaagtgtgccaaaaccttcaggtgaatgaaactctttcaattgattgggagcgcgaccgcccgcgggtcatttgggacgaaggcgtcgccattaatgaatcttcctgcgtcagctgcggccagtgtgtcactgtctgcccttgtaacgcactgatggaaaaatcaatgctcggccaagccggttttatgacaggaatcaaagaagatgtcatggaaccgatgattgatttagtgaaaaatgttgaacccgactacacaagcatcttcgccgtgtcagaagtagaagcggcaatgcgcgataaacggacgagaaaaacaaaaaccgtctgcacgttctgcggcgtcggctgctcttttgaagtatggacaaaaggacgtgacatccttaaaattcagcctgtttccgatgctccggttaacgcgatttccacttgtgtgaaagggaaattcggctgggacttcgtgaattcggaagaacggattacaaaaccgctcatccggaaaaacggcgcattcgttgaatcgtcatgggaagaggctcttgaccttgtcgcttcaagactcggctcgatcaaggctgagcatggtaacggttctgtcggttttatttcttcttctaaaattacgaatgaagacaactatgtcatccaaaaattagcgcgccaagtatttgaaaccaacaacgtggataactgttcacgctactgccagtcaccggcaacggacggcttattccgcaccgtcggtatgggcggtgacgccggcacaattaaagatatcgcaaaagcgggcctcgtgctcatcgtcggcgccaatccggcggaaggacacccggttctcgccacacgcgtgaaacgcgcgcataagctgcacggacaaaaattaattgttgccgatctgcgcagaaatgaaatggctgaacggtccgacctctttatcagcccgaaacaagggactgaccaggtctggctcatggcagtgacgaaatatatgattgaccaaggctggcatgaccaagcgtttattgatgaaaacgtgaattactttgatgattataaagaaacgctgaaaaaatatacattagaatacgcggagcgaatcaccggactttctcaagatacgatcatccgcattgccgaaatgatccgtgatgcagacggcacttgtgttctttggggtatgggcgttacccaaaatacaggcgggtctgatacatcagcggcgatttccaacctgctgcttgccacagggaactaccgccgcccgggtgccggagcttatccgctgcggggacataacaacgttcaaggcgcttgcgatatgggaactttgccgggctggcttccgggatatcagcatattaccgatgatgcggcacgggctaaattcgaaaaagcttacggtgtcgaaattgacggcaagccgggccttgataatattgaaatgctccatgcgattgaagaaggaagcatgaaagccatgtatcttgtcggtgaagacatggcgctcgtcgattcaaacgccaaccatgttcatgacattttatccagccttgatttctttgttgtgcaggatattttcctttcaagaacggcgcaatacgcggatgtcatcctgcctgcggttccatctcttgaaaaagacggaacatttacaaacacagagcggcgtgtgcaaagattgtatcaggcgcttccgacacttggcgatgcaaaacccgactggtggattattcaggaagtagccaatcgtttaggcgctgattggaattacacgcacccaagcgatattttctcagaaatggcgagcctttctccgcttttcggaaaagcaagctacgacgttcttagcggctggaacagcttcctatggggaagctttacgggagaaagcactccgcttctttatgaagacggctttaacttccctgacaaaaaggcccgttttgcgctgagcgactgggtggagcctgccgtattccctgaagaatatgacctgcacattaacaacgggcggatgcttgaacatttccacgaaggaaatatgacaaacaaatcgaaaggcatacagtctaaagtgcctgacgtatttgttgaagtatcgccggagctcgcagctgaacgaggaatttgcgacggaacaatgatccgtcttgtctctccttttggagcggttaaattaaacgcgcttgtaacagaccgagtccgtgcaaacgaactttatctgccgatgaactctacagataaagattcggcgattaatttcctgaccgggcccgcgtatgattcacggacacatacgcctgcctataagcagacaaaagtccgcatggaagtgctcggttcctgtgatactccgccgcttccgaaaacgaatccgcggaacaaaaaacgccacccgcaaaacggtgtggaagcgcagcgaaaatggaaccgtccgggctatgtgcacttaactgattaaggaaaggaggaagcattatggcaagcccaattactgaaattcataaagaaacaaaaacagaggaacagctgaaagccgaaaagctggaagagctgaagacgcttcttgcagaaaatgaagaagccgtcgcgaaaacgatgtctattatggcagagctgaatggcttggggatttttgatgccgccggctatatgctccaggcgaaagaggaaattgccaaaatcgcactcggacagatttcccgggaacctgtcacaaatcttctgaatacgatgatggccgcgggaggcgcgctgtcaaaagccgatcccgaatttatgggcagacttttagagagcgtcatggccggaacggatcaggcgcaaagctttttaaaagaagaccggaaagtcagtatgtttgaactgatgaaagccgccggtgaccctgatattaaccgcgcgctcggcttcgggctgcagtttttaaaaggaatgggaaaagaattacgaaaaactccaactgaataagaaacgaaaaaagccattgtcaaaagacaatggctttttttattcatcggcctcgtccagcctctttttataaataagtgaacggtcaacgcagaaataagcgcccgctaaaaatacacaatcggttacaaacatcagcattttctggcctgcagtcagcccttgtccgggaagaaccgcgccgatataaatgaaggtgctgactgcaagcagaataaatgcgtaatgcttaaaatcttctattaatgatttcagtcttttcttctccatataaggtcacctgccagttttatagtctaacaacattataatataagctgacagccgacagagaatgtaaatctatccaatctttataaaagtgaatcaagcgcctgtttcacatccgccgttaaatcctcagtgtcctcaataccgactgagatccgtacgagcccgtccgtaatgccgagtgcaagccggcggtcgcgcggaatcgaagcgtgtgtcattctggacggcacggagattaggctttcaaccgctcctaagctttccgcgatcgtaaacaggttcaatttttctaaaaatgcgtcgacacgttcgctgctgccgatatcaaaggaaatcattccgccgaaaccggagctttgcgcttttgtcagctcatggcccgggtgtttcggtgatcccggatagtagagcgtctgaacggcatcatgcgcttcaagcagctcggcgatctttccggcgctgtgattgatggcgtccattctgagtccaagcgttttaatccctctcatcaacagccatgaatcctgcggtcctaaaacgccgcccgttgagttttgcacataatgaagcttttcgccgagctctttatcagccgttacgactaagccgccgacgacatcactgtggccgccaagatattttgtcgcactgtgcagcacgatgtcagcgccgaagctgagcggctgctggaaatacggcgtataaaacgtattgtcgacaatgagcaatacgcccgcttcttttgcgatgtcagacatcaatttgagatcagtcactttcaaaagcggatttgtcggtgtttcgatataaatggctttcgtattcggacggatggctttttggactttttctttactgctcgtatccacaaaatccgcttcaatgccgaaacggttcagcacacctgtcatcacccggtaagtgccgccgtatacatcgtccgtcaaaataacatgatccccgctgtcaaacagcatcatgacggccgtaatcgcagccattcctgagccgaacgcatatcccgccgcgccgccttcaagctctgtaattaaactttcaagagccgtccgcgtcggattggccgttcttgagtattcatagcccgtgtgctcgcccgctttcggctgctggtatgtgcttacttgataaatcggtacggaaaccgctccggttttttcatctcccgtaattcctccgtgcaccatcagcgtttttttcttcatcttactgacctccttggaaaatattcttgcttatataacgatcgctgccatcagggaaaatagtgacgatatttgacccggcgggcgcttttttcgcttcctcaagcgccgcatacagagccgcccctgatgagctgccgattaagagcccttctttttcggccgcttctctgacgaacgaaaatgccttatcgtcctctactgtataaatggcgtcaaaatggctctcgtccatataatccgggataaactccatgccgatgccttctgttttatgggcatgcggttctccgccgttcaggatggagccttccggttcaacgataaccgttttgacggcaggatttttttcttttaaataagctgccgtgccggcaaaggtgccgccagaacccgctccggcgacaaaagcgtggatattgccgccgagtgcgttccatatttcaggtccgagcgttttatagtaagtcaatggatttactcggtttttaaattgcaaaacagcataagaattactgatttctctctccagctcaagcgcttttcggatggctccctgcatgccttcttctctcggcgtgtgcacgatgtcagctccgagtgctttcataatctgctgcttttccctgctgaaatgctccgggacgcaaaaaacggcgcgaagctgatgctttctggcgcacagagcgagtccgattccggtgtttccggcagtcgcttcaatgataacgccgcccgcttttacttttcccgtgcgaagcgcatcctcaatgagcatctcgcccagcctgtctttaatgcttccgcccggattcatcatctcaagcttagcataaaccgccgttccctccggtatatcaaaatgcttgaggcgaagcagcggtgtatttccgatcagctctgtaatgtctgttatcacgttcaacatacgtcctccccctgaaagcgggggagaacgagaatcccccgcttagtgaattcgtttgatgacattcaggacaagctcagttgaatgaacggcagcctgttctaaaaatttatcaaatgaaacgtcagattcttttccggcaatgtcagataaagctctgatgacaacaaaaggcgttttgaactggtggcacacctgtgcgacagccgccgcctccatctcaaccgcgtacaaatccgcaaacttggcgcgcacgtcttcaacccgcttcggatcattcataaaagaatctcccgttgcaattgtgcctttggcgacttgaatgccgttcagctcagaaaccgcttcctcagtaatgctgatcagcttttcatcagctttgtatgctgccggaagaccgggcacctgtccgtattcatagtcaaacgccgtcacatccacgtcatggtggctgacatctgttgagatgacgacgtcgcctacattcaatgtatgatgaaatccgcccgctgagcctgtgttaatcacataatcaggtttgaaacggtcaagcagaagcgtcgtgctgatcgccgcgttgacttttccgatgcctgatttgagcaatataacttcgacgccttcatagctgcccgtcgtaaactcacagtgcgcgatcatctcttgttttgcgtctttcagtttgcttcttaaaatcgtaacttcctcttccattgctccgatgactgccagtttcatttatacacaatcccttcgatttaccgtttaatcgcctccattatccagacaaagtcattttgctgcgtaaatcgcgcggcaaacccctcagttgaaaagatgtttttcattgtcccgagtgtcggataatgttccgtctttaaatcgtccgctaattgatgatagccgtttcggcttgctttttttatagcttcatcgtatgcttcttgatctttaaagacggtatcggcaaacactattttatcatgcttctgaagaattgtgccatactgctttacagccgtttgcttttcttcatcggttaaatgatgaaaggcgtacgagctgacgatggtatctatttgaaaaggcggagcgggaaactccagaaaatccccgtcactgaacacggctctgtcagaaagcttgtcagctgccagttttctcattgacggagacggttctacaccaaacaccttttttttcgcggcggctaatttcgccgtcaaattcccagtgcccggtccgaactctaaaacgtttgaacctgaaagtgcgacgatgctgtccagaatattgtcatatcctttaaaaacatcggcatattgtttgtcagccccgtgcaccgtggcgtcataagtcgctgcccaatcttcgaataaaggaataaattcacggcccatatttttcactctccataatttataattcctatgagtatagtatggattaatcgtggaacagttcctatcctatcacaaaaaagaacgaaagggtactaaaatactctgggattattgcgcaattacggcagaaaggcttatactttcattgactcagaagaaaaatcaggaggatctgtactgatgaactttcaattggatttaataaaagataaagtagaatttttcgaagcggcatctttgcaggagcttgaaaagaaaataaacgttcaggttgaaaacaaccaggcgattatgcttcgcgtccgttctgtatctcatcaggtgacggccgttgacggcagaatcctttacagcgcgtcggtgcatttttccgctgacgtatgacagaaaaaagcagctgactcttcagctgcttttttgcggttattttaatgtttctacttttgtcggcttccagccttttttgtcttgccaagtgatggtaacctgatactttttgccgttcgttttgtctaaaattttacccttcgcatcttgcgggcttccattgtttccgagccacagcactgtcatgtgatcttttgacacgccggttgcgtaagagatggcgtcgagcatttcagaccagtcttcagagcttgaatcatacgtcgccgtatgttctcccgtctgctttgtgccgaccgctttccattttgagttaacaattgttttatcgacattgctggatgagccgccctctgttatttctgctcctttaaaaggatcgcttgaatcagagtcttttttgctgctgtcatcacttttagatgaatcatcatcttttttgctgtcagagtctgaagatgaatcagatgtgttcttatcctgtttatcttttttgtcatcgtctgacgccgtatcttttttgctgtcttttatgtcttcatctgatgtctgcttcgtcttgcctgatgcaggtgtttcctgcttttggctcgtgtccgctttttcgctcacgtcgctggacgggctgttgatgaagaggctgactgcaacgacgacaataagaatagatacgatagcaattaaaatgttaagcaccatatttgcttttctgcgcttatcacggttttcaaaacgagattgtttattgctcaatcattctgcactcctttatccctcttgctcagcatatattttaacatgggctgagcggttgttctatgtctagtttgtttcattttcatgtacctttttaacaatatcataaaacactgtatttgtcagagccttatcccccggcgtgtccatgtgcagcaccacgagagcgtatttcggcttgtccgcgggaaagtatcccgcaaaccatttgtggtaaagcgtctgtttttcttgtgtgaacattcccgtctgggccgttccggatttgcccgccaccgcatacggcagatcctgaaatctcctgccggttcctttcggtgaagtaacgacttctctgagaattttttgaagctgctgcgccgtatatttatcgatgcttttccccttcagcggctgatctttgaatgacgccatcgtcgttccatttttgtattcgattttgtctgcgattttgacttgttttttttcaccgccgcgtgcgatcgttgccatcatattggcgacttcaagaggcgtgactttcacgtttttctgcccgatcgccgtctgtgcgactgctctttttacggttttgtctttggcatctccccaaatgacgccgcttttttcattatacaattgcctgaatccgtcttcccggtacagcttgccttcccagcccgcccgctgtgtgagaccgagcttctccgccatgttttcaataacggagtcatcttttttgaccaatttttccgcaagacttgtaaacgtataattgcagctttgggcaaagctctctccaaaactgagcgtgcctttgtcgtcacccggctctccgtacaggttgagactgcagttaaaggaagtgctcggcttcacttcattttgttcaattgcggctgcggcgatcaccgttttaaacactgatcccggatatatcggcgtcagcatgtaattttgcagagtctgctgctttgacatgtcggcgtcaggctttgataccataccgagcacactgcttttttcaatgtctaaaaggacggctccccccttttttaacccgcggtctttcaatacatcttccattgctttttgaatattgcggtcgatggaggttttgacttgcagcggataaaacgcgtttgcttcagccgtatatttgacgtccattccgaataaagggtttccccttccgtcgacatgatacaaaagttttgtgtcctgatccgctagtaaaaactcatcaaacgtccgctccatcccgcttgtcccgatttttgccgtgatcggcagttccttgcggccggggtatttctttttcaaaagctccgggtcctggtttgtcgcgcccagcagatgggcggctatgtttgtttctttgctgtctttcatatatacgccgtaaatgccgggatatttcaaagaattgatatttgatacggattgtttcgtcagatgtttgatttttttgctgtttaggatcaccggttttttcgcctccgtgagcagctgcctgagctcctcctgtttcattccgagaatggcggatacccggtcaaccggccaatcctgagtcacgagaaagggaaacagaacgacggccggctgcttttttccggtcagctcttcgccgttccgatcaagaaaagagccgcgtccgtctgaaataaggacttcttcagtccgctgcttgacgctttcctgaatcagattaatattagattttgaaaaagattctgtaaaaaacagctgaatttcagcaagtctggcaagcagaaagaaaaatacgagcagaaaacaaataacggccgctttcagcctttttgatacgatcataaaaaacacctcatccacattttggacgaggtgtttcattgttaaacggatcttatgaaattttcacaattttcacgagcatttctccgcccggcgtctgaactgtgacttcttcgtccacttttctgccgagcaggcttttggcgattggcgagtcgtttgaaattttcccttcaaacggatcagcttcagcgcttccgacaatcgtgtaagattcttcttcaccgtcaggcaattcgatgaatgatacggtttttcccaaaccgacaacatttgaaccgccgtcgtcctcgatgattttcgcattgcggatcatgttttcaagcgtcgtgatacgcccttccacaaatgcctgttcttcttttgcagaatcatactcagagttctctgacagatccccgaagcttcgtgcgattttaatgcgttctactacttctttacgtttaaccgttttcaattgctctaattcttgttcaagtttttgttttccttcttgagtcatcggaaaaactttttcttgtgccatgttccttcactccttggtggttgtccctcaacaataacgtgtgattatgtatgagagcataaacgaaaaaatcaagaatgagaacacagggcagtcctcgttcttctctcccatataggtactgtttatcttaaactgaatgtgtgttttctgcaaatgtttcggtttataaacagggaaagaagggaactgtctcattcccttccagcctatacataatatggtctgagttatttatgtctatgctatggtattacaaaattgcattttgttcaaggatcgtttgaatcttcgtgaccatcagatcgatagcgacgtgattttggccgccttccggaataatgatgtccgcgtagcgtttcgtcggctcaacaaactgattatgcatcggcctcacgacggagacatactgctcgatgacagaatcaatagaacggcctctttcgttaatatctctcataatccgtctgatgatacggagatccgcgtccgtgtcgacataaagtttcatatccatgaggtcgcgaagccttttatcttcaagaacgagaatgccttcaagaataatgacatccttcggctcgaccggaatggtttcctcagaacgcgtatgcagtttataatcataaatcggcttttctatcggccgataattcaaaagctcttgaatatgctcgattaaatagtcattatcaaatgcgagcggatgatcgtagtttgtgttcagcctttcttcaaacggaagatggctttggtctttataataaaggtcttgctggatcattaaaatcgagtgtcctttaaactgttcgtagatggaacgtgtgacgcttgtttttcctgatccggaacctcctgcgatgcctataactacaggactcttacccattggtgattacttcccctttctcatcatgttgctcggataaatctttttgtctaccttaaatgtaacgatttgcaggggatggcgggcagcatcaagctcgtttccgtcttcgtcccaaatagtgccgatggtgaatgtgaaattatcgatttcgggaccgaaaaattccacttcgtcaccttgtttaaagaaattgcgctgctggagcgtcaccatttgagtttcctcgttatatgcgagcacgagaccggcaaaatcaaatgttgttttctttccgtgttcgccgaacatctgctcttcaaaaccgggcgtgccttcaaagaaagcaggcgcagtatcccggtttgcacatttgtccagctcatcaagccattctttttgaatgacaaagttttcaggatcagcgcagtatgcgtcgatgactttgcgatacacgctgacaaccgtcgccacgtaatgaatcgatttcatccggccttcaattttcaggctgtcgatgcccatctcgatcatttgcggaatggattcaatcaattttaaatctttcgggctcatcgcaaatggagcgtcgtcttcgccgtagagcgcgaccgcgttcgcaccgtctgtctgatacaggtcataatcccagcggcaggactgacagcagccgccgcggttggaatcacgggccgtcatgtgattgctcagcacgcatcggccagaataagcgatacacatggctccatggataaaggtttcgatttcaatatccaccttttccttcatttctttaatttccagtccgctcgtttcgcgggcaagcaccacgcggtcaagcccttcttctttccagaactgcaccgctttccagtttgaaagggactgctgggtgctgagatgaatttccacatccggggccactctccggcatgtttcaataatcagcggatcagcgacgataattccggcaactttcgcgtctcccaacgcttttaagtattcttccagaccgtccatgttttcattatgggcaaaaatgtttgttgtcacatatattttcgccccgtattttttggcaaattctacgccctctgcgatttcttctatagagaagttatccgcatttgagcggagtccgtattcctgtcctccgataaaaaccgcgtccgctccgtaatgaacggcaatttttaatttttcaaggtttcctgccggagcaaggagttcaggttttttcgtaatgacgcgttttccgtttacgactttggaaatggtttgatttacggctgtcatccgttgcatcctcctttttaatagaccgtttctttaaagaagaatcctgtgtcgatgcttctgttcacaggctgaatgctttcaatccgttctatccagctctcttttttctcttcatatgtctcccggctgccgaagcacagatcgattgcttctctgtacatgcgggttacttcaattaagtattcaggagacttcaagactccgtcgattttgaaagaatcaatgccggcttccatcagatcctctaactcatcaatcatgcacacatcgttcgggctcatgatgtgcgtgccgttttcgtcttcaaaaatcgggtatttattgccccgttccttgtcatgcagaaacatgcccgcttcttttttcttctgttcgatgtccatgacttttccttggtattcgaagtaatggcccactaacgaacgcttggattggaacatgcaggtcataccgtggatttgaatttcaatttccacttcggcgttttcttttatgtcaatgatgctgtccatatttaattccttagccagcactgcacgccgtgcgcctttgcgtccccagtaattgcaggaatagtagttggttcccgttgtttccgtgctccagtggagtttgagcccgggagccgcttcccgcgccgccattaaaacggccgggtcgccgaaaacagccgcatcaacgccggcttcctgcaaaaaggcaagatagccgttcagctcgtccactttttcattgtgaaaaatagcattgacagcagcgtacactttcgcaccttcttggtgagctgtctttacggcttcttttatatcttctcttgaaaattctccggccagtctcaggccgtatctttgttctccgactaacagcgccgttgcgcccgcttgaatgagcggaagaatatcctgtacggaagtcggagtcaccaaaagttcaggttttttcatgatcattcacctcttctttttactgatggcgatgccgtctccgaccggcagtataaccgtttgatagtcagagcggttcatcagccattggttatattgatcaattttttcaacaagcttccgttttcttttcggctcaatttccgagtgatcttgtgccaccagtcctttaaacaggacgttgtccgtgaaaatgacgccatccggcgcaagcatcggttcatagagctcaaaaaagttcgtgtactggcctttggccgcatcgataaaaatggcatcataaggagccgtgacacgaactgactcagaaagtgtcagcgcatccccgtacagtacgtgaatccgattttccatttcaaagtcttttatattgttcacagcttcttcatagcgtttgtcgtcccgttcaatcgtgtaaatattcgcatccggaagctcaagcgccatccgtatggcggaatacccgattgccgtgccgatttccaatatgtttttcgcctgttgaatcgacagcatttgaagcagcacttcaatgcccgcttcttccataatcggaacatggtgctcttttgcataggcttcaagctttttcactttatcaggccgaggcttcagcatcgcgtttatatactcgtttatttgttcataccgatcattcacggcaaacagcctccgttctaaaaaggagtgcccctgacgaatccgcggggacactctcttaagacacttctttattcataagtaaacaacccgatatattttatcataaaacctttcagaatggaataaaaggagagcttttgccccccttttattcactgtcttttttggaaatatacttttccttcgctttattatgatcttttaatgttttcgtgaaaacgacctcgccgtttgattttgccaggaaatagagataatccgttttgtcaggattgagagccgcttcccatgatgaatccccggcatttgcaatcggtcccggcggcagccccttattcttatacgtattatacggagaatcaattttcaggtctttgtagtagacacggcttttatgcttgccggccgcatataaaaccgtcgggtcagtctgcagcggcattttttctgcaagcctattgtaaaaaacgcttgcgattttgtgacggtcggctttggcggtggcttcctcttcgataagcgatgccatcgtcagagcgttatggacggaaagtttctttttttccagttctgatttataggtttcaatacgggtgtttgtttcctgaaccattgccgtcaaaatcttgtcaagcgatgcatccggatcattaaacggatatgtagccggatacagatagccttcaagcggatgcttaagcttcttgtttgaaagagcgtccgttatcgtatcaggaaacttgtttttcagtttgttaataaatgttttgtcgtccagtttcgccatgatctcttcttttgaatatgatgtttcgtttgcgatcgcatcagcaatctgtgtaagctgttttccttcaggaacggtgatctgaaaggcatatcccgcagatcccgcggtcagttttttaataatcgcatccgcgtccattcctttattcagatggtaaaatccggcctgaaatccggaagcgcctttatacttcacatacagctgaaatgcttttttgcttttgatgacatgctgatcctcaagaatctcagcgattgccgaaaccgaagaaccgcttggaatattaatgttgactgtcgttttgctgccttcgtcaaccggagacagcagtgattttccatagaaaaaagcaccgcaaatgatgataaaaagagcgatcacggaggacagtattatcgtcgtttttttgtttttacgcagaaatgaatttttagtctgattgatagtcatacaagtattttcctcccaacagctcttatactacatgattcatgcgcattcggcaatttattacaaaaaaagccgaagcggcatatgcgctccggcttttttgttcattttattcttcgtcttcttccgctaaaaacgtgttcagcgtttcttcgatcatttcccactcttcatcagtttcaatcggcatcagttcgccgtcttcaccgttttcattcggctcgaagcttgaagcgtgaatttcgatttcatcatcgtcctgagcatcaatcggataataaagtacgtaagatttgttgaatgtgtcgttttcaaatgtgaacagcacttcgcaaagctgttcgttgccttgatcatcgacaatcgtaatgtgtttttcgccgtgttccatttctttcacctcttagtttagactgtccagaaacccttgaagtatcatgacagccgccattttatcaatgactttttttcgtttttgcctgctgacgtcagccgcgatcagcattttttcagccgccatcgtcgtcagacgctcgtcccacagcacaacagggacattgtacgctgtttcaagcagtttcgcaaatgtttggctggcttcgcctctcggaccgatcgtcccgttcatgtttttcggaaaaccgagtacgatcttctctacattatagtctttcatcagctcggataaacggtccagaccgtaatctccttcagcctcgtttatttttatcgtctcaatgccctgagcggtccagcccatttcatcgcttaaagctacgccgagtgtcttcgttcccagatcaagtcccaatattctcatgaatgtatttacgcctctttatgctgttctagataggattttaccaattcctcaattaattcgtcacgttccaatttgcgaattaagttccgggcgtcgcgatgcctaggaatgtatgcaggatctcctgacagcaagtatccgacaatctggttgataggattgtatcctttttcctgaagcgcatcatacaccgtaatcagcacttcttcgacgtttgtttcagcagaatcatcggagaaattaaatttcatcgttttatcaaacgagctcaccgttttgcacctctttcccaaattcgcaggcaaagttcagcctgaggtcctcatcttatcatcattctacactagttgaaaggattataaaacggattttatccaatcttccgcagaagtgagcgcctcttccaatttctcaggctgctttccgccggcctgcgccatgtccggacggcctccgcctccgcctccgcagacttcagccgcttgtttgaccattttgccggcgtgaaggcctttttcgatcaggtcttttgttacgcctgctgacaggttgactttgtcattttgcacggcaccgagaatgataaccgcagaaccgagcttcgccttcaggtcatccaccattgtgcgaaggtggttcatgtctttcgcgttcactttttcagccagcacttttacaccgccgatgtcttttactttagacagaatggctccggcttccacattgccgagtttgcttagcaatgattcattttctcgttgcgcttctttcagctccgcttgaagagactggatccgcttcggcacgtcttttacgtttgttttcagctcatccgcagcatgctgcaaaaggctgagctggctgttcatttcctgatacgcgccttttcctgttacggcttcgattcttcgcgtacctgcgccgatccctgattcggatacgattttaaacaggccgatttcagccgtattcgtgacatggcatccgccgcaaagctcaaggctgtaatcgccgacttgtacgacacggacgatatcgccgtatttctcgccgaacagagccattgcgcccatttcttttgcttcattgatcggttttaagtcaatcgccaccggaatgctcgcccagatcttttcgttgacgattccttcaatgcgctcaagttcctctttagtcacttggccgaagtgagagaagtcaaaacgaagacgattttcggtaacaagtgaacccgcttggttgacatgtgtgccgagaacgtctttcagcgcctggtgcaaaaggtgggttgccgtgtggtttttcaccacgccgcttctcatttgatcctctacttcagccgtcacgcttgcccctttttgaatcgtgccgctatccactgtgccctcgtgtacatgctggccgttcggagcttttttcacatctttaatggttacgacagcctgcgcgcttctcagcacccctctgtcaccgatctgtccgccgctttcagcatagaaaggcgtctcatcaagaagaatctgaacggtatccccttcatgagcctcgctgattaattgtccgtcatgaagaagctcgatcaccttggcttcagcttttgtggcactgtagccgacaaacgtgctttctgcggtaatgtcgcgtaatgcgccgccctgcacctgcatgcttcctacatcttggcgcgcatttctcgcccgttcacgctgtttctccatttcggcttcaaagcctttatggtcaaccttcatttgttcatcttccgcgtattcctccgtcaattcaactgggaatccgtacgtatcgtacagtttgaatacgtcttttccggagatgatgccgctgccgttttctttctctttctttatcacgtcagataaaatcgccaaaccttcgttcaatgtttcatggaagcgctcttcctccgttttgatgactttggcgataaactcttgcttttcttttacctccggataaaaagcgtccataattcctgcaacggtcggtactaactcgtacataaacggacggctgataccgattgttttcgcgtatcgcacagcccggcgcaagaggcgtctcagtacatacccgcgcccttcgtttgacggcagcgctccgtcgcttaccgcaaatgcgaccgttctgatatgatcggcaatcactttaaaggccgtatccttcaccgcatcctttccgtaagcatctccggaaatgcgctctgccgcttcaataatcggcataaacaaatcagtgtcaaagtttgtcggaacattctggataacggagaccatccgttcaagccccatgcccgtatcaatgtttttcttcggaagcggtgtgtacgtgccgtccggattgtggttaaactctgagaataccaggttccacacttcaagataacggtcattttcgccgcccggatacaattcagaatctgacgggtcattgccgtatttctcgccgcggtcatagaaaatttccgtattcggtccgctcgggccttcgccgatatcccagaagttcccttccagacggatgattctttcttccgggacgccgattttttccgcccataacgtataggcttcttcatcctccgggtgaaccgttacggacaggagctccggatcaaagccgatccacttttcgctcgttaaaaactcccatgcccacgtgatcgcttcttctttaaaataatcaccgatggaaaagtttccgagcatctcaaagaacgtatggtggcgcgccgttttccccacattttcaatgtcatttgtgcggattgatttttgcgcgtttacaattctcggattctccggcacaacgcgcccgtcaaagtattttttcagcgtcgcaacgccgctgttgatccacaataaagacggatcttcatgcggaaccaatgaagcgctcggttcaacagcatggcctttttctttaaagaaatctaaaaacatttgacgcacttcagcagatgttaagtgtttcatctatattcctccttatcactacccgaaattctcttttgcgacagcaaaaaagctctctccctatgcaaaccatgcgttcacacagggacgagagctgtctcgcggtaccaccctgattacaggccgaaaaagacccgtcacctttcatcccgtaacgcaggactgcggcagcctttaactgcactcaggattagcttcggccaatcttctgctgaagctcctttcagcgtatcggagcttctctcttaaacagggcttcggcgtactcatatccgtcactcgagattcgtatgtattctactcgaaattatagacaagcagaacccgaatgtcaatgttccgtcctgatccgcaaaaagtgaatggccgtcacttttaaaacggctgctgccggaacggcgagaatcatgccgggaatccccgcaagctctcctccggcaagaagtgcaagcataatcacgacgggatgcattctgaggcttcgcccgacaatgagcggactcaaaatattcccttctataaattgaagaataaaaatcgtgataatcacgatgatcacagcctttgcagaaagcgccagcgcaaggagcagcgtcggaacagcgccgataaacggaccgaaatacggtatgacattcgtaatgccgatgacaaggcccaagatcagcggataaggaaggccgaacatccaaaaagaacagcctgctattaacccgagcaaaaaacaaacgagaagctgtccgcggatgtaatctccgagggaatcgtccacatcccgcagaaattcactccccctttttctccaggacttcggcgtcaaataccagaccgtctttttcatggcgtctatatccttcaccatatagaaaacgagaaaaggaatcgtcgccgcaatcaggatataatcaaacacgaaacggatgcttctgatcgtgctctcaatcgttccggcaaggaacgtttctgtctgctgaatcattttgtccatccggtggtgcatgccgtcaggccaatgatccgtatgattgtgcagatgcctcagcatgctgttgtagttttcagcaagcccgggaatgctctcagacagatcctgcagctgttcaattaaaacaggaactcctttataaaccccccagccgattccgccgaaaaacaggaaataaatcagaagcaggcttaaagttctaggcatccctttcccatgaagccattcagtaatcggaagtaaaagataagcaataaatactgcgatgaatataggaataaagagagattttataacaagccatatgggtgcccataacatatcgagcatacaaaagacatacactgttaacaaaacgagcagacatacagccgtccacattaagagctgcagcggtttttgaagcatgacgtttcacctcttgctttatcttttgacagaaagccggaattattcccgtttcataaagtccgccttatgacgcagatctcttgacggaaataattatctgaaattacaaaaaagtttgaatataaatcataaaaatctgaataattatcatagcatgaagttaattcgaaaacttattagtctatatgacatgtttttcttaggaggattgccatgatctcatttcaggatgtaaataagcattacggacattttcacgtgctgaagaacattaatctgcacattaaaaaaggggaagtcgtcgttatcatcggaccttcaggatcgggaaaaagcacgcttctccgctgcatcaatcagctggaaacggttgatgaaggcgccttgacggtaaatggcgccgacatccatgacaagaaaacggatatgaataaagtccgccgcaacatcggtatggtgtttcagcattttcatctgtatccgcacaaaaccgtgctgcaaaacatcatgctcgcaccgatcaaagtgctcaaacaatcaaaagaagaagcaaaagaaacggccttatattatttgaaaaaagtcggtataccggacaaagcggacgcctatccttcacagctttcaggcggccagcagcagcgtgtggccattgccagagggcttgcgatgaagcctgaggtgatgctgtttgatgaaccgacatccgcgcttgatccggaaatgatcggggaagtgctggatgtcatgaaaacactcgcaaaagaaggcatgaccatggtagtcgtcacccatgaaatgggattcgccaaagaagtggcagaccgcatcgtatttatcgacgggggatctatcttggaagaagctgcaccggctgagttttacgcaagccctcgtgaagagagggcgcgtttattcttaagccgtattttaaatcactgaaaagaaacgggggaacgattatgtcacgcgtaacaaaatggttatctgtcggtttgatatctctgctggccgtctttatgctggccgcctgcggagggaaagaaacggccggcgattcaaagggtacgggaaaagacacgttagcctcaattaaagacagagacaagattatcttcggcgtcaaaaccgatacaagattattcggactgaaaaatccgagctccggcgatattgaaggctttgatattgatattgccaaacagatcgcaaaagatattctgggggatgagaaaaaagcggagtttaaggaagtgacgtcgaaaacgagaattccgatgctgcaaaacggagatatcgatgccatcacggccacaatgacgataacggatgagcggaaaaaagaagttgatttctcagacgtttattttgaagccgggcaatccctgctcgtcaaaaaaggaagcagcatcaaaagcaccgaagacctcaaaaaaggttcaaaagtgttggcggtaaaaggctccacttcctcacaaaacatcagagaaaaagcgcctgacgcctccgttctggaatttgaaaattacgccgaagcgtttaccgcgctcaaggcgggacagggagatgcgctcacaactgataatgcgattttatacggcatggcggatgaaaataaacaatatcagctgacaggcggcacattcaccgatgagccttacggaatcgccgtcaaaaaaggccaatccggactcgtcaaggaaatcaacgcttctttgaaaaaaatgaaagctgacggcaggtatggaaaaatctataaaaaatggatcaaagaagaaccggcaaaatagaacggaccgcggggtgagcaggcatgctcatccccgttttataaggagtgacatggcatgaacttttcaattttaatggaaaacttcgatatgtacatggacggtttcctgcacacattgcttgcgagcttcatcgcgctggcaggcagcttcgcgctgggcgttctgatcgcagtcatgagaatcacggctttcaaacccatccaatggatcgggactgcgtatgtggaatttatccggaacattccgcttctcctcatcaccttcgtattttatttcggacttccgaacgccggactgagactggacggctttcaggcggggacgattgcgctgacgatatatacgtccgcttttatcgcagaagccatcagagccggaattcagactgtctccaagggccaaatggaagcggccagatcgtcaggcttcacctacagtcaggcgatgagatacgtgattctccctcaggccgttaaaatcgtgattcccccgctcggaaaccaatttctcaaccttgtcaaaaactcatcaatactcggagtggtggcgggactggatttgatgtatcaggcggatctcgtttcctcaagcactctcgtcgtgtttgatgtctatatctttgtcgcgcttttttatttgatgttaacaataccgctcagcatcggagttcactatttggaaagacgcctcgggaaaagttattaaaaaaggagagtgaaaaacatggattttagcggcgcctatacatcggatcatctgctgtttttatggaacggctttttgatcacactttatgttgcgctcatttccattattctcagttttattttcgggcttgccgccggcactttgcgctatgcgaaaatccccgccgtctcaggcgttatagccgcaattgtcgaaaccatccgtaatctgccgctgttattaatcattttctttacgttttttgccctcccggaaatcggcatcaaactggaaattaccgcggccgccatcacggcgcttacgatttttgaatcggccatgctgtcagaaatcatcagaagcggtttgcaatccgttgaaaaaggacagattgaagcggcgcggtcttcagggctgacatatacgcagactctttttctcgtcgtgatgccgcaggcgctcaggcgtatggtccctccgattgtgagccagttcatttctttattaaaggatacgtcacttgcggtcgtaatcgctctgcccgaactgattcataacgcgcagattttaaacggacaaagcgctgacggagggtatttttttccgatctttctgctggcggccctgatgtatttcgcggtcaattacagcctgtctcttgcagccagacggctggaagcgagacaaacgtaaaaaggatacttccgaagaagtatcctttttcacttaaaacattttcatgactcgtcttctcatccgtttcataccttttttattcagcatatcggactgagaagccatacgatacataacggctcctgctcctaaagccaatagagaggtcattgttctgcccatcgcgcgtatctcctttcaacattaaaaattgatactgcgttcgtcttcagaaaacaaatcatcaagactgcttaacgtgccgtcttcctctacttgatgtgtcgcaattttgcctttggccaccgtcagctcaataaagcagccccagcaatagtattggtttacgccgattttgccgatatctttacttttgcagttcggacatacaagcacagactacacctcttatccgttcaggacgataccgtctttccccgcttcaataagcgtatcggcggcccggcgcacttggcgtctgcctgccagatctgaaaagaaaccgtccgtgagttcatatgctacgattatgcccttgtccaaacaaaagtatacatcttccagcaaaccgaacatttcaccatcaggcgatttcaccggctgcatcttaatctgttcaaaggtgaaacagctcttcggcaaaggctgcaaatgagcttcggcggcagctacggcttcttgatccatctcttttatatcactggctgctaaaaaaagatggcggttgtgaaacaggcgtttctgctccagcacaaaaccgagaaaccggccgtcaagagagaaacacacatccgaaatcatcccgaggctgcgccggttgtgttcgtcataaactgttcgtccttcagctgcatggcatgttctcaaagtgtgatcaaccaccttttgttgaacacgtataggttttgccgagaagccgggcgccatactttgaaatgacttccacaataaaacccggcgtatgtgccgggttttatttacgctttttcttccataaagtcaaacggcgtaatgccttccattccgatgttggcatcatatacactgaacggcagttctttttgcagagcggccagttctgcatccatctcttcagtctgctctgtgagcctgtttttaagcgacgtctgtctgacggtggcatcattgtttttgacgccccattcaagcgcttcttcttctccgcaaaggatcagaaatttcttggcccttgtaatggcggtataaaggagatttctcctaagcattcgatagtagcctttgacaacaggcaggacgacaatcggaaattcacttccctgagacttgtggatggaacagcagtaagcatgggtaaactggctgaaatcctttttcgtaaaggtgatttcattaccgtcaaacgagacgacgaccatgtcttctttttccgtattttctttggcataaaaaatggacacgatttcgccgatatcaccgttaaacacattgttttccggctggttgacaagctgcaatattttatcgcccgtcctgtagacgacatctccgaatttcagctcccgccttttttctttcggcggattcatgatgtcttgaagaagtatattcagctcgttaattcccgcttttcccctgtacatcggcgcaagcacttgaatatctctggaggtatatcccttctttaacgcgtttgaaacgacttgatcgacgacttctttaatctgtgcagaattacagcggataaatgagcggtcttttgtcggcgcggtcagtccttttggaagcaatccttttttcatatcatgagcaagttcgacgatggatgacccttccgcctgacggtaaatatctgtcaggcgcactgtcggcagcacctcagaagccaaaaggtctctcagcacctgccccggccccacggaaggaagctgatcttcatcaccgacgacgatgagctgaatgtgcttagggagcgccttaaacaaatggctggcgagccaaatatcgagcatactcgcttcgtctataatgatcagtttcccttcaatcggctgatcttcattgtaggtaaagccttcagcgccattccagccgagcagcctgtgaatcgtaacagcaggcagacccgtagattcgctcatccgttttgcggctcttccggtcggcgcggcaagcagcaccggaaacgcctcgtcttttttataatcaccgggatcaagcgatacgccgtggagttcactgtataattccacgattcctttgataacggtcgtttttcccgtacccggtcctccggtcagtaaaagcatcggcgacgacagcgctttttgaatggcatccttttggctcggagcgtattgaactttcatccgttcttccagttcgccgagcgcaagcagaaattccgattcaggaaattgatcggcatactccgtctgagccgcaatgtcgagcacgcgttttgcgacattttgttccgcgtaaaacaaagacggaaaatagcagcggtctccttctatgacgatgtccttactctctccgagggcgatgatgccgtcagccgcatccatttccgtgacgcggcctccgtcagctgactgattcagtagcgtttgcgtattgataatcagctgctttgtgtctatgtaagtatgaccttctgaaaggcaggtcgattcaatcgtatataagatcgccgctttgatccgctcgggatggttccctgacagacccatttttccgcccagctcgtcggcttttacaaagccgatgccttccacgtcctttacaagctgataaggattctcctgaattttctcaagggtttccgtttcgtaagcttgataaattttcatggaaagctgaggtccgaaaccgtattggttaagagaaatcataatctgctccagcccctgatgccgctgcagctctccggcaagcttatccgctttctttttggacattttcggcacatcgtaaagcaccgacgcatcagccagaattttattcagcgcgccgtctccaagctttttgacgatttcttccgccgttttttttccgattccttcaaacagatcacttgataaatagtgaatgatcccttctttggtggtcggaatttcttttttaaagtgttcagcctggaattgcaggccgaacttgggatgtgtggcggtttttccgtaaaatgtgtaagtctcatcttcttgcagcagagggaagtagcccgttacggatacgaccttgtcttcgatcgcctcagacgtttctgcaaccttgaccttcagcactgtatacaggttggtgtcattgtggtaaatgaccgtatgaataacgccttttacatacggttgttcctcgattttcagctgatccacgagccttccctccttccgttatgactgggtgataagctgttttgcatgaagcgcaagcatatgatcaggctgtatgccgattgcgccttcaagcatctcaagcgccttttcacgattttctttgtaggcgtaagcgactccggcattataaaatgcgtccgcgtggcttgggtcctgctcgatcaccgtctcaaactgcgccaatgcttcatccagcatgtcttcgtttgcgagacacattccgaactggaaccgcgcttccgtatcgttttcgttcaattcaacggcccgctgcaaatacggcagcgcaagcttcggctgctctaatttaacgagaacggttcccagcatataaaacaagtctccgttttccataccggagcgaagcgctttttcaaacatatccttcgcttcagaaaacgattccttcatcacatatacgtttcccgctccgtaataagcggctgccgctgaattgtccaattcaagcgctctgttgtaaaaagcaagcgcgcgttcgagttcgtttacagaagaaagcaggttcgcaaagttgatatacggcaccggatcttggccgttttcctcaatcgctttcgtaaaagcctctgccgctttttcaaaatcgccctcctgcatggcgtcgattccgattttattataatccatttttaacttcctttcgctaaaaaacctcaacatgcgagttgaggttttttacatgtgttatacgtaccacaattttgttccgtctttataaacgtcatcaatcgttccgccgccgaggcactcttctccgtcataaaaaacgacggcttgtcccggcgttacagcacggacctgcttgtcaaaaatgatttccgcttcgtcagcacccgtcattttcaccgtaactttgtgatcttcctgacggtagcggaatttcgccgtgcatgtcatttcgccgccgtccatcaaacccggacgcgtccagctgatatttgtcgccgtaattttatcagaatacagaagcgggttatggaatccctgatcaacatacagaatgtttttttcaagatctttaccgacggcgaaccacggctcgccgcttccgccgattccaagaccgtggcgctgtccgatcgtataatacatcagtccgtcatgacggccttttacttccccgtccattgtcatcatatcgcccggctgagcagggagatattggctgagaaacgttttgaagttgcgttcgccgataaagcagattcccgtgctgtcttttttcgccgctgtcgcaagttctgcttctttggcaatttcccgcacgcggcttttttgcagatcaccgatcgggaacatgactttactgagctgttcctgattgagctgattcagaaaataagtctgatccttgttttcatccaggccgcgaagcatgcgcactgtatctccgcttcggtccacgcgggcgtaatggcctgtcgcgaggtaatccgcgccgagtgataaagcatgatccaagaaagccttaaacttaatttctttattgcacatgacatccggatttggagttcttccggctttatattcatcaaggaaatattgaaataccttttcccagtattgcttttcaaaattgacggcataatacgggattccgatctggttgcagacccggatgacgtcttcataatcttccgtcgccgtgcaaaatccgttttcgtccgtatcatcccagtttttcataaagattccgattacatcgtagccctgctccttcagcagaagggccgccacggaagagtccacgccgccggacatgccgactacgactcttgtatcctccggccgtttttccatttgcattcactccattaaaaacgtaagtccgccgttttaagcaagccgtttgacgacggcggcaagcttttcggcggctgtttcgatttgttccgccgtattgccgaggccgaagctgaggcggattgacgaggtcagcctgccgctctcacttccgaacatggccgtaagaacatgagacggaagaacggaccccgccgtacacgcagatccgcttgagacggcaatgccttccatatcaagattgaccagcagcgattccaccggcacaccgggaaagtaaaggtttaaaatatgcggcaggcagttctcggcatctccgttcacctccgctgtgacgccggctttttccagcgtgctcatgatgatgtttttaaactccttaaacatcgctgttttctcttcccgctcacggtttgaaagaacgaccgcttcctttaagccggcaatgcccggtacattttccgtacccgcgcgccgctttcgttcctgctcgcccccgagaagaatcggtgacagcttcacctcttgatttacatataaaaagcctgtcccttttggcccgttaagcttgtgaccggaaacagacagcatgtcaattctgctttttttcacatcgatcggtatataaccgaatgcctggacggcatctgtgtgaaaataggcctgatgcccgcttaacagctctccgatttcgtcaatcggctgaatggttccgacttcgttattgccatacatgacggtaacaaggattgtatcatcacggagcgcttctttcacctgatttgcactgatccgtcctgaagggcccgggatgaggtatgtcacctcaaaaccgtcttcttccagcttttcgcaggcgtgtaatacggcatgatgctcaatagcggtcgtgataatgtgtttcccttcattcttccgggcggcagccgtgccgagaatcgctaaattatcagcctccgtgccgccgcttgtgaaaatgatttcctgttctttcgcactgatttcacgcgcgatgtccgctctcgcttcgtcgacccatttccgggactctcttccgaatgaatgaatgcttgacggattgccgaagctgccgaagaaatgaggcttcattttttcgagcacacgctcatccatcggggaagtcgcggcgtgatctaaataaatccgttccattgtctttacacctctggtttaaatatagaacatataagcttcctgctcgccgtccgtgtagctcgcaaggtcttctaacgtcgtactgtccagcacgtcttttacggcgtcgcggatgcggatccataactcccgcttggcaggctcttcatcctcaagcacttctaccgggctgatcggcccttccagcactctgataatatctccggccgttatctcttcaggctggccgccgagcacataaccgccgtaagcgcctctgatgctttttacgagtcccgcgtttctgagcggtgatacaagctgttccaagtaatgctcagagaggctgtttgtttgggcgatgcttttgagcgacgtcggaccttctccgtgctttttcgccaattcaatcataatggtgagcccgtatcttccctttgtcgatattttcaatatgaacaccccagtcaattctaattgttaatttatacaagtaaatggatatgaataatcagtttagtatcttatagaccaactgttattataacataacttatcctaattttcattgaaacacggggcccgccgcaattcgcttttctaatcggccgttttccgttaccctgtatatgtaaggagagatgttcatgaaaccattggcgtatcggatgcggcctgccaatatcgaagacattatcggccaggaacatttggtcaaagaagataaaatcatcggcagaatggtgcgcgcaaagcacctatcatccatgatcctgtacggaccgccaggcatcggaaaaacgtccatcgccacagcgatcgcaggatcgacaagcatcgcattcagaaaattgaatgccgtcattcataataaaaaagacatggaaattgtcgtacaggaagcgaaaatgtcaggtcaggtcatcttaatacttgatgaagtgcacaggcttgataaggggaagcaggattttctcctgccctatttagaaaacggcatgattattttaatcggcgcgacgaccgccaatccttatcatgccattaacccggccatcagaagccgtacccagatattcgaactcgaaccgttaacaccggatctgatcaagcaggcattgagaagagcgctcacagatgaacaccggggactcggttcctacagcgtttcggtggacgacgaagcgatggatcatttcgcgcaagggtgtggaggagacgtccgttccgctttgaacgcactggagcttgccgtgctttccacaaaggaatcaagtgacggcacgatccgcattacgcgggaaacagcggaagaatgtctgcagaaaaaaagctatacccatgataaagacggagatgcgcattatgacgtcttatccgcattccaaaaatcaatccgcggctcagacgcaaacgccgcacttcattatttagcccgactgatcgaagccggcgatcttgaaagcatttcaagaagacttctcgtaatcgcctatgaagatatcggccttgcaagcccgcaggcaggcccccgggtgctgagcgcgattcagaccgcagagcggatcggctttcccgaagcgagaattccgctggcgaatgcggtaatcgaattatgcctttcgccaaaatcaaactccgccatctcagccgttgatgaagcgctcaaagatatcagatcgggtaaaatcggcgatgtgccgaaacatttaaaagacgcccactataaaggagcccaagagctcggacgcggaatcggctatcaatatcctcacgatttcgaaaacggatgggtcgaacagcaatatttgcctgaaccgttaaaaaacaaacaatactataaaccgaaacaaacggggaaatttgaagccgccataaagcaagtgtatgaaaaactgctgaaacagaaaaaataatcggacaaggacacccaatgtgttcttgtcttttttttataccggccggccattcgtgtgaacggcggctttattcaaataaaaaacagcctttcctgaagaaggctgtttttctttttatttatctttgacccgtttaatgtcaatatcctttaagagctccataatgacatgtccgcccataatcagaccggccactgacggaacccaggcgttggaagacggcggcatttgcgctttgcggattttcgcttcgtcattcccgacttcttttctgacatcttcacggatgacgatcgggctttcatcagaaaaaatgacctgaacgccttttttaatgccctctttgcgaagcctagtacggacgactttggcaatcggatcagtatgggtttttgaaatatcagcaatctgaaagcgtgtcgggtctgttttattcgccgctcccatgcttgaaatcagcggcacattccgtttcagacattctttcatcagatgaattttataatgtatcgtatccgacgcgtcaatgacgtaatcgagcggatactcaaagaactgctcatacgtctcttccgtataaaacattttcaaggcgacgacgtcacaatccggatttatatctgcgatccgcgctttcatcaagtccgttttcggctgccccaccgttgacaagagagcatgcagctggcggtttacgtttgtaatgtcaacatcatctttatcgacaagcacgatccgtcccactccggacctcgccaatgcttcggctgcgaatgaaccgactccgccgacgccgagaacggccaccgtgctgttttttaacgtgtccagcccttcttttccaatcgctagctcatttctggaaaactgatgtaacaagaacctcactccacattctggttttataaactcggcttgtcaaaaagccgctggttttaacgcacaaaaaataaagtcccaattgtgccgttgcagctttccttcgttttgaacccgctctcagcaggtgggtgcccttttttaaactttgtaagtcccctttaccgaatgaaaagaggcatgtacgccatttaaaaatacgggctcccaaatcaaaaaaatgttcggtcaaaactaggtgtacaactaacacatcaggactttatttaacttgtcaaaatcatatcacagcagtttttgattttcaagaaacaaactgctgatctttactgtttcacttttcttttgacagaaaggtgaagttcttcaagctgggcgtcgctcacttcgccgggcgcttccgtaagaagacagcttgcgcttgccgttttcgggaaagcgatcgtatctcttaagtttgtgcggcccgcaagaagcataaccaaacggtctaagccgagcgcaattccgccgtgcggaggagcgccgtattcaaaagcttcgagaaggtatccaaactcctcctccgcttcttcttttgtaaagccgagaagcccgaacattttttcctgaacgtctttctcaaaaatacggattgagcctccgccgagttcatagccgtttaagacaaggtcgtaagcctgcgctttcatatcctcaggcgccgtttcaatcaggtcaagatcttcacggacaggcattgtaaacggatggtgagccgcatagaaacggccttcttcctcgtcatgctccagtaacggccagtccacaacccacaggaagttgaagaggctttcgtcaatcaggccgcgttctttaccgagctttaagcgaagcgcgccgagggattgggccacaacctcaaacttatcagcgccgaacaggagcaggtcgccttcagaagcatcaagcgcttctgccagttttgcctgcttctcattatcaaagaatttcgcgatcggaccttttacgccgtcagcttcaactttgacccaagcgagacctttcgcgccgtaatttccggcaaaaacgccgagcgcatcaatatcttttctggagtagtcgccggcagcgcctttgacattgatcgcttttacaacaccgccgttggcaacggctgatgagaacactttaaactcagtatctttcacaatgtctgatacgtccgtcagcagcatgccgaagcgtgtgtcaggcttgtcggagccgtagctgttcatcgcttcttcatatgtcattcgcggaagcggcagcgatacttcgacgccttttgtttcgagcatgactttcgccatcatcttttcggccagagccatgatgtcttcttgactcataaaggacatttcgatatcgatctgcgtaaattccggctggcggtcggcacgcaggtcttcatcgcggaaacagcgggccacttgataataccgttcaaagcccgacaccatcagaagctgtttaaaaatctgcggcgattgcggaagagcgtaaaattccccttcatgcacccggctcggcactaagtaatcacgggcgccttccggagagcttttcgttaaaatcggtgtttcaatatcaagaaatccgttttcatccaagaaatggcggatggattttgtgacttgatggcgcatttgcaatgtttgaaacatcgccgggcggcgcaaatccaaatagcggtgttttaaccggacgtcttcagaaacgtcagccgcttggtcactgatcggaaacggcggcgttttcgccgtgctgagcaccgtcactgcttcagctttgatttcaattttaccggttttcaggttgggattcaccgtgccttcttcacgggcagaaaccgtgccttcaatatcaagcacatattcatttctgattgcttctgccgcggcaagggcttctttcgagacgtcaggattgaacacgacttgcacaatacccgaacggtcgcgcaaatcaataaaaatcaagccgccgagatcgcgccgtttctgcacccatcctttcagtttgacggtttcgccaatcgctttttcagttatttcgccacaataataggttcttccaaacatagcgttcctctccttcactgcttttgatctgcctttaacacttgtatcagctcgtctaacaccacttcacgctgctctcctgtttccgcatcttttacattgattttattttgggcgagttcatcttcccctaaaatcgcaataaagcgtgcgccgagacggtcagccgttttgaattggcccttcatttttttgttttcataatcgatttcacttgagatgccagcttctctcagtttgtacacgagagaaacggaataatccttcgctttttctccgagcgtcacgatgtagcagtcaatcccctgattgacaggaagctctgttttctcagcgtcaatggctgccagcagacgttcgatgctcatcgcaaatccgatacccggcgcttccggtccgccgatctgttcgacaagcccgtcatagcggccgcctccggcaagggttgtaatcgctccgaagccttccgcattgctcatgatttcaaaagcggtatggttgtagtaatcaagccctctcacaaggttcggatcaatttcaaacggaatgccgagcgccgtgatgtactgctgcaccttttggaaatatgcggctgattcttcatttaagtaatcaagaattgacggagccgttttcatcagctcatgctctctgtcttttttgcaatcaagaattctgagcgggtttgtgtgcagccgcgactggcagtctgagcaaaattctccgatacgcggttcaaaatgtttgacgagcgcttcccggtaggctttgcggctgtcctggtcgcccaggctgttcagaacaagcttgacatttttcaaaccggctttacggtaaatactcattgcaagcgcgatgacttctgcatccacggccggatctttggagccgatcgcttcaattccgaattgatagaattgacggaagcgtcccgtctgcggacgttcgtaacggaacatcggtccgacataatacagcttcgtcggctgcaccggatttgcaaataatttattttcattgaacgcgcggactgcagcggccgttccttccggccgaagcgtcaggcttctccctttacggtcttcaaaagtgtacatttctttctgtacgatatctgtagactcaccgacgcctcttgcgaataattccgtatgttcgaagatcggcgtgcggatttctttatattgataagtgcggcacgtctctctcataatttgttcgacgaactgccatctgtctgattcacccggcagtatgtcctgtgtgcctcttggaatgtgatatgccatgttacaggcctccttaatgtctttcttcattaaaacatgaaataaaaaaactcccgcccctactatacatgtatagtagggacgagagttatacccgtggtgccaccctagttggaatgccgaagcatccccgctctgaccgttaacgcaggttcacgtccgctgcctaatgactgatgcccttttccggcaaagcgttcagcagggaacctccggagtgttgtttcgagaaagatgcagtgcggatccgctttcagcctgggacggttcctctcttctccatgcattctgacctactcttctccattatcggttcaaaatcgttatcatgacttatgtacatcaatttctattataataatgggattgcacgcccctgtcaagttttattccgtctgtttttccttgcgaccgcttctttcgataagagaccgaactccgttgccgtctcttcaagaaaaccgtccttctctctatcgctctgatcactgaagtgaagatttccttccgcatcgtgcagcgcgcgtcccatttttggttgaaatttcatgatttgcacaccttttcgctgtatttatgactagtataaacaaactattttatttttatttaacattcagcaaggaaaatgcgatattatacaagaatgtattttagttagttcagaaaggaggacagccatgagtaagagaactcttgttcttattttatgcggcgtcatcatcacagcgcttcttccgtcattccacaccgcagtcgccgcagagggagaagcggtcatcgcgacagacaagatcaatgtcagaggcggtcccggcctgagctacgaaattaaggctgaagtaaaaaaaggggaaagataccccatcctcaaggaagagggagactgggtgcagcttcagctgagccccggtaaaaccggatgggtcgtttcctggctgatatcaaaaacagccggaggagcagacaatgcatccgcaaaaagcggaacggtcacttccactgaccctgacctccgcatcagaaaaggcccggggacatcatatgaagtcatcggcaagtttccgcaaggcgcacatgcatccatgctggacaagaacagcggatgggtgaacatttcttatcaaggcacaaccggatgggtttcttccgaatacgtcaccgcggacagcggcggatcggatacgaaagcaaattcgtcccaaagcggttcaaagaacgggaccgtcggcgtttcttcattgaatgtcagaagtgcagcgtcacatgattcagccattatgactaaattatcacgcggaacaaaggtttccatcttaagcgaagatcacggctggctgaaaattgaagcaaacgggcaaagaggctgggcagcaagccactacatcataaaggattctgactcatcggacagcgcggccggttcgggagacagctcagacacctcgaaaaaagcgtatatcgtttacggcggcaccaacttaaggagctcagcctcgacttccgcttctatcgtaaaaagagcggataaaggcgcagcctatccgattgtcggctcaagcggcaaatggtatgaagtccggctagaaaacggacaaacagcatatgtggcaaactgggtcgtgcaaacgtctaaaagcggtgaagaaacaggagaagcaccttctcccaacacgtcaggcggcagcggctcacttaaaaataaaacgatcgtcgttgatcccggacacggaggtaaagacagcggaacgatcggctactccggaaagtttgaaaaaaacgtaacgattaaaaccgctaagctgctggccgggaaattgagagcggccggtgcaaacgtgtatatcacaaggcaggatgatacatttatcagcctgcaggccagggtttcaacctcccattacaggaatgcggatgcctttatcagcatccactatgacagctatgccgatacgtcaacaagaggaagcaccgcttattattacagtccgtctaaggaccggcagcttgcctcagacgtccattctgaagtagtgaagcgttcgcctatccccgatcgcggcgtactgtttggagattattacgtcctgagagaaaataaacggcctgccatgctgtatgagctcggctatctcagtcaaccgcaagaagaaacaatcatacatagcggctcttaccaggaaaaagtgacagacggaattgaaagcggattggaacattattttcaatcataaaaaaaaagctgccaaacggcagctttttttattgtttagaatccataatcaatgtaacgggcccggaatttgtcagctgaacatccatcatggccccgaatattccggtttccactttgactcctttttcccgaagaagttcgttccacttttcataaaggagcagagcctgatccggtttcgccgcattcataaaattcgggcgtctccctttcttcgtttcgccgtaaagcgtaaactgggaaactgataaaatctctccgcccgtatccaaaagcgataaattcatcttgccgctctcgtcatcaaaaatccggagattcacgattttatcggccaagtaggcggcatcttcctctgtatcttcatgagtgacgccgacaagcgccataatgccgggtccgatccggccggcgacagcgccgtcaactgtcacacttgcatctgttacacgctgaacaactaatttcatagcaagctccttttagttcattacccggcggactgaatatatgtctctgatctgcttaatccgctcgaccactttgtgcagatgattgatgttttgaataaaaatcgccatatgaatcgtagcgactttattgcggtcggatttgcccgagacagacgagatgttggttttcgtttcgtttacggcctgaagcacttcatttaacagcccgagacggtcataccccagaatctcaatctcaacgttatattctttgcgtctttgaacttgtgattcatgctcccattcaacagggatcaatcgttcctgcgcttcattcgtttttacgttcggacagtcatcacggtgaacggatacaccgcgcccttttgtaataaaaccgacaatatgatcgcctggcaccgggttgcagcatttcgacaaacggacgagaaggttgtcgatgcctttcacgcgcacacccgcttcccgttttctcccttgcggatactgtttcggctcggaagtgacttcctgaacgattttttcctgctcttcctgatcacgcagcttccgttctttttcggtgagcctgtttgccacctgcaaagcggtaatcccgttatacccgaccgccgcgtacatatcctcttcatttgagaaattgaacttgtcggcaaccttttgaaggttttcgagcgttaaaacttccttcacttcaaaatcaagatttttaatttctttttcgaccagctcacggcctttttcgacattttcttcacggcgctgtttcttgaagaattggcggattttgtgtttcgcctgtgacgtctgtgcgagtttgatccagtcttgactcggaccgtatgaatgcttggacgtcaggatttcgacaatgtcgcccgtccggagcttatggtcaagcgtcaccattttcccgttcactttcgctccgatggttttgttgccgatctcggagtgaatcctgtaggaaaaatcaatcggtacagagcctgacggcagttcaatgacatcgccttttggcgtaaatacgtataccatgtcagaaaataaatcgattttcagcgattccataaattcttccgcatcggtagattcgttttggaattccagaatttcgcggaaccaggacagttttttctcaaatgtcgcttcttcgtttgcagccttgccttctttatatgcccagtgtgcagccaccccgtattcagcgatctcatgcatctcaaacgttctgatctgcacttccagcggatcgcctttaggcccgattactgtcgtatgcagggactgatacatattcggcttaggcatcgcaatataatctttgaatctgcccggcatcggcttccagcacgtatgaataatgccgagtacggcgtagcagtctttaatgcttccgacaagaatacggacggcgagcagatcatatatttcattaaactgtttattttgcagcgccatcttgcggtaaatgctgtagatgtgcttcggacggcctgaaaagtccgctttgatattcacttcttcgacgcgttttttcacttcattgacaacctcatcgacataaagttcgcgttccgcgcgctttttcttcatgaggttaacgattctgtaatattgctgaggattcaaataacggagagcggtgtcttcaagctcccatttgattttagaaatcccgagccgatgggccagcggagcgaaaatttccagcgtctcatttgaaattctccgctgcttttcctgcggaagatgctttaacgtccgcatattatgaaggcgatccgccagcttgatcaatatgactctgatatcctgagccatagcgacaaacatttttcgatggttttccgcctgctgctcctcttgagatttatacttaattttaccgagcttcgttacaccgtcgacaagcatcgccacttcttcagaaaatgcttccttcaggtcatcgagggtgacatccgtgtcctcgaccacgtcatgcagaaatccgcccgcaatcgtggaagggtccatttccagatcgacgaggattcccgccacctgaatcggatgaatgatgtacggctcacctgatttgcgatactgttcgcgatgcgcgtcttgcgcatacagataagctttctcaacaaacgcaatctgctcctccggcagataagtgcgcgctttatctattacttgctcggcagtcaatacttgttcgttcgccatggaatcaccttttttaaatgtaaactgtattagtttattatcaagaaaaaaacgagagatgtaaagggcagaagttcaaaacacctaaagaatctgtcaggatgatgaaataataggaaaaaagcaccctgacacgagtgcttttttccatatgcggtttaatatttcattagtgttaaaatatcgtaatcgtcaagctttgctctgccgtcaaggtaagaaagctcaattaaaaacgcaataccggctacgacgccgccaagctcttccacaagcttaatcgttgcttcgatcgttccgcctgttgccaataagtcatcagtaatcagaacgcgctgtcccggcaggatcgcatctttatgaatggtcagtacgtctttgccgtactccaaaccgtaatcgactttaatgacctcacgcggaagttttccttctttccgaaccggcgcaaagccgactccgagcgcatatgcgaccggacagccgataatgaagccgcgcgcttcgggcccgacaactaaatcaatttctttttcttttgcatattcaacaatttggtcagtcgcgtaacggtatacgtcgcccttgtccatcaatgtcgtaatatctttaaattgcacgccttctttcgggtaatcgggcacaattgttacgtattttttaagatccatctgttctatgtcctcctcgtactttcataagcctctgaaccttggttcatcagcttattcagccattccttcagctcatgggctgcggaataattgagcttctggtctaattccatcagctgctgttttacctgataggtttgcgaatctgcgaggtcgcgttttttcgcgccgctcacgacagacagcacaccatcttctattttaacaaaaccgagatcaaaaaacacctttgtcatgaaattgattgtgtcaattgaccatcctctgtgtctcgcaagctctgaaccatgcttgcctaagttaaaagtgccccttttcaagagaaatgcgtaaaaccacttgaagtcattccgcgatggaaatgaggacaggaaatgttcttcatgattaataaaaacaaaataaatccgttccggcttcttcccgtcaagcaaacgctggaggcggtccgctgatggcggcacatccagaaaaacggcatactttccgtcaagcggaagagcttctgcttcggattccgacgtgatctcagccagctcacccgaaagctcggcacggagctttcgggcggttttttcgttaaagctgatgagcacccgtttttccttaggcagcgcagtgaccgtatcttcccacatccgcttgcccctgatatcaaaaagctgccattccggcaccgcagcatctttaatcatcagctggggtttctttctgttgttccattcattaatagacatctcgccgacaatggaaatcgttgatccgggaacaatcccggcttcaagctctcctttgttaaagccgacgcagtcgagagcggcggaatcatttttcaccgtcattttcacgtgatttttatttgctccgatcaggcgcacctcatcaagcacggcgttttccaccatcacatgaggtttagggtttagcatgccgaacggcgacagcatattcaattctgtaatgctttcaacggtgatgtcttcgacgccgcagacaagatcaacctcctgaacggggataaaatcctcttcggtaagggtttcttcagccatttgattcagccgatcccttaaatccgccacatcttcagccttcaaagtcattcctgcggccatcggatgtccgccgaaatgaggaagaatgtctctgcactgtgacaggctcgtaaaaaggttaaagcctctgatgcttcgcgccgaccctttggcgattccctgctcctcatccatccccagcacaacagcgggccggtaaaagcgttcagccagcttcgatgcgacaataccgacaactcccggattccagccggcttttgccacgacaatggcagaagggtttccgccttgctgctgaaccatttcaacagcctcttcggtcatggttttcaccattttctgccgctctttattcagccggtcaatatccgaagccagctcctccgcttcaaactggtcatcggtcatcaacaggtgcaccgcgggatcagcctgttctattcttccgacggcattcagcctcggtgcgacctgaaacccgatcgtttcctcatcggcttgtccgatatctccgccggaaagcttaatcagagctttgagacccggccgatttgtcgtccgaagcctttcgattccaagcgacgctattaatctgttttcatcatgcagcggcaccagatcagcaaccgtaccgatcgccgccaagtccagcatagcttccggcaaagaacccgtaagcgcgtgggcaagcttaaacgccacaccgacgccggccaattctttaaacggatagctgcagcccggctgcttcgggtggataatcgcaaatacgtcaggaagctcgggtcccggctcatggtggtcggtaataatgacgtctaaaccgagctcttttgcgacttcggcttcatgaacggcggcgatacccgtatccactgtaatgatgagcgaaaatccccgctcttttatggagcggaaagcttgttcattcgggccgtagccttctgtgaaacggtcgggaatataaaagtcaacgttcgctgacagctgtctgagcgccgtcagcatcactgacgtgcttgtaacgccgtctgcatcgtaatctccgtaaatcataatcggttccccgcgggaaaccgccagctttatccgatcaactgcttcccgcattccctttaattcatacgggtcataaaagtctgcatcctttgtatgtaaaaacagccttgcactttcggcagtatcaaaacctctttttacaagcagcgatgccacaagaggtgttatgtccaattgttctgtgagtgatttgaccttttccttatccggctgctggatttcccagcgcatttttgacgctaacataaattcacccctcaaccaccctattatactagagcggactgaggggtttcaaatgttattctgatccttttttctcttccagcatttcttccggcggagcggctggttttctgacgtccggatcagccggcaattcagcagcggatctgttttctttccgcagcattttaatttcacgcttcagcttcatcacttgaaatataccggctgaaaacacgatcagcgcccccattaacacagagcctaaaatgactaaaatcagcggccattcagcggttccgaacagataatcaacctcaaccgcccgcacgttaatgacagcaaaaatggcgacaatcagagtaaataataaagcgaatataatagtccattgtttattcatgcgtcagcccccaattattaattcttatcttttccctcattttcctgcgggtaaaccccgggctcaggacatccgggccgttaactgctcacgaaccagctttttcaatccgcttctttccccagataagacgagggtgtccccttcttcaatcacggtatcaaaggcgggagtcagctgtttttgccggtttttcttcacgatcgcaattacctgaacgccgtattgttccttgatatccaaatctccgattgtgcggctgacagccggcgcatgagattcggctttaaaccactcaatgacgaggtcgtcaagcgcaacttccacagattccagcgctttcggtttatacgtcatcccccctaaaatagcggagatctgcctcgcctcttcatcgttaaattcaacggatgccaagcactcgtcatgatcatcctcatcgaagtaatagagctctcttctgccgtcatcatgaagaataatactgattttatcgcgatttttcgtaatgacttcgactttctggccgatgcccggaagctccgactcacgaacgttcataagaaccctcctacatgtttttacagtgatgattgattatgtaagcgtatgtcattatagcaaatgcaggttttaagttcaatgcagcttgaaaaaacaggctgtcttctgcaagacagcctgtttcccattactcttcgattgattttttcgatttaaattcttttcctttccatacaagccacatctgtgcggcgatgtaaagagaagaataaacacccgtcaataaacctatcaataaggcgacggagaagtttgtaattgacgatgaccctaaaatgagcagcacgacgacaacaatcactacggttaagaccgtattaatcgagcgtgtaaaggtttgctgcaagctcagattcacgatgtgttccagatcggcaaatgacttcggcttgcgctttttcatctgctcgcgtatccggtcaaatgtaacgatcgtatcatttatcgagtaaccgataatggtgagcacagcggcgataaaggtgacgtcgacctccagccttgtaatgctgaaaaacgcgacgataaagaaagcgtcatacagcagggatacaattgcggcgacagccattctgtactcaaaacgtattgacacgtaaataatgatgccgattgatgcaattgccacggcatataaggcattacgggccagctcttttccgactgtcggcgataccgtgctgacattcggttcagctccgtatttgtccttaaagtacgttttgatttcagcgatcttttctttagatggctctccgacaaaccgggccgcggcgacatggttctctttacctgagagcactacgttttccgggtccatgccgagagagtcaaagtctttttcaacctgctgcgccgtcaaggcatgattgctctgcacgtcaatccgcgcgccgcttgcaaaatcgattcccaggttgagtttaaagatcagtaagatgataattcccgcaatagtcacagcacttgagaaaataaagaagtattttcgtttgctcgtgaaatcccatttttggaacgccgtatgcggttcagtattttcatctgttttctggatgtccataatatgttttttcttgacgccgaaccagccttttttccggtcaagccatctgctttccacaagaagggagagcaggaatcttgaaaggaagacagctgtaataaagcttgtcagaattgacaaaatcagcatcgtcgcaaacccttttacagagcttgtcccgaaaataaagagcacgaccgctgcgatgatcgttgtgatattcgcatcgaaaatcgtcgcaaatgaccgtctgttccctgaacggaaagccgagcggacggattttccgagtttcagctcttcttttatccgttcataggtgatgatattggcgtcaaccgccatccctacacccaaaatgagggccgcgatacccggaagtgtcagcaccgcctgcatccagtcaaacacttgaagcgtaatatacacatatacagaaagcgtgataaccgcaatgagacccggcagtctgtaataaagcagcataaataagaaaacaagtgcaatcccgatgatgccggcctctaccgtatcatgtaaagcctgctgtccgaattgcgcccctactgaagtagagtatttttcggtcagtttcacaggcagcgcgcccgcgtttaaaatattggccaagtcctttgctttttgaacggtgaactggccttcaattgtgacatccttcgtatttaattcctggctcacattcggagcggatacatatttcggatgttttttgccgacttcttttttaaatgaatcgcctttttgataatcaagccagatgacgagctgattattaggcgccattttcttgacttttttcgtcacttctccgaacttgtccgcatccttcagcttcacgctgacaatcggttcgttcgtcgtcggatcgaaagtttgcttcgcgccgttttcaacgagatcagagccgtttaagagctctttatcattcgtgtccctgaacgagagctgcgcttccgttgacagaatttcgcgcgccctgttctgattcgtgacgcccgccagctgtacgcggatgcggttgttcccttcaatctgaatgttcggctcgcttacgccgagaacgttagcccggcggttcagcgcctgcaccgtgctgacaagcacgtcttttgtgattttatcgccttttttgacgggctgcacatcgtacagaacttcaaacccgccgcgtaaatccaatcctaacgtaatatttttggcagccggctttgtaaaataccccagccctgtgccgatcaataatacgatcaggaaaaacgcaatcaagcgtccttttttcattatgtatttcctccttaaacctatgccgtcaaatcattatctcagcagttcatccaaagcttcctgaccttcatcgctttccagccaattagacgacttaaaagcttcgacggttgcatagttcataaaatcgccaattttaactgataaaatatcgccggccaatttatacagcggcagttccgttttctgtttccactttttatgtatgaggtatgaccataaactctcatgttcaacatcatcgtatccgaggattttgaactcttcaagtttactgtacaaaaaaggccgcaaatgatctttatacatttcggcgggatgtttctccactgggcgctcgctcctttttccctttttctcgaagacttgtcatgctcggacgacatcggcgcatatccttattgtatatgattccaggtagtttgagaaggcaggggttgtaaaatggcaaaacagacttttttaaggggcactcttattctcatcacagccgggatgattacaagaatgctcggctttgtcaaccgggtggtcatcgcccggtttatcggtgaagaaggggtcggattgtacatgatggctgccccgacatttttcttggccaccactttgacccaattcggcctccctgttgccatcagcaagcttgtcgctgaagcaagcgcccggggggaccgggaaaaaatgaaacatattttagtgatgtcgcttaccatcaccgggatattaagtctcatctttacgccgctgtttttatgctttgcgccgattatggccgaaacgatgctgactgatcaacgcacggtttacccgcttttggcgattacgcccgtcgtgccgattatcgcaatctccagcgtgctgcgcggttattttcaaggcaggcagaatatgaacccgctggcgttttcccaagtgcttgaacaaattgtgcggatttcacttgtcgcggtctgcacgacggtgtttctgccgtacggaattgaatatgccgcggccggagccatgatttcgtctgtcatcggggagctcgcctctcttatttatttattcatttgtttcaaggccaaaaaaacaatcagaatcagaaaacaatttttcaagtcgattgcaaatggaaaagaaaccttccgccagctgatgagcgtgtcgcttccgacaaccggaagccgcttcatcggaaacttgtcttggttttttgaacctattgtcgtcgcgcagagccttgcgattgcaggagtggccaccgctgctgccaccagccagtacggggagctgaccggttttgccatgacggttttgacgctgcccagctttataacctattctctgtcaacagcgcttgttcctgcgatcagtgaaggaatggagcaaaaaaagctgcaagttgtcgaataccgtctggaacaggcgatgaggctgtgtcttttaagcgggggcatttcagtggttattttattctctttcgctgatgagctgatgtccgtcatgtacggatcaacgaatgcagcggtatttattaaagtgatggcgccgttttttctgctttattattttcaggggccccttcaagcggtgctgcaggcgcttaatttagccggggccgccatgatgaacagttttatcggcgccgctgttaaaacaggccttatttttgtgctggcgaccaggccttcgctcggcattatgggcgcggcattggcgattgtgacgggaatggtcctcgtcaccctgctgcatgcggccactgtaagcaaagtgctcccgatcagcattaaaataaaagaatacgcgctctgctttgccgtcatattcatttgcggctatgtgagccgcattataaagcacgccgttcatttttcagggtcagaggctgttaatctcacaggatggattgcaatgaccgtgatactgtacattgtgcttctgctgatattcaggctgattaaaagggaggagctgatccggattccggtcatcggccggtttgtgatgcggtgagtccggtttaaggctcccctttttcatttttgatatcaataaaaaaagccccgtctgtaaacgtgcagaatgatatttccgaaagatcgcgatatcctctttttgctaaatttttttcgagccagtgtttgtctttcccgattctgtctaaatgctcgttttgaacgactccatcgacaatgagcggggtttccagctgcttatccttattgtttttctttttgacgattgacagttttcctgatgactctaaaacggcgtatgacacgtcagaaattctttcgatgttattttccctcagctgcatcagaaggtcgtcaaaattgtagcgctgtgatctcatcgcccgttcgtcgatttttccctgtttaatgatagtggttggcttgccgtcaagcagctgccgtattttttggcttttgagcgagacaaaagcaaggcttacctgaataatcattaaaatgacaatcggcacaatggtatgcaaaagctgatcctctacattttcaattgccaaaaccgctatttcagcaatcataatggaaacgacaaaatccaaaatgctcagctctccgatttcccgctttcccatcagcctgaaaatcacaagaatgatgatgtaaagcactattgtacgaaacgtaataatgaaaatatctcccatatcgcacctccaacggtcatagcatttgccatccgctctgttttatgtaagaaatgagctgaacatgatgcttttacgtctaatccgaacattcagagaatacatttagaaaaagacaggctccggcttgtcatatgtcaggccgcagggcggggaggagataaaaatggaagaaacaaaacaagtgggaaaaggcgtcttgtacggcttagtagctatctttgcagtgatgctgctgacgagtttggcgatttcactgttactgacggtcacctcaatggaagagtcatctttcagctggctgatcaccgcgctttcttttctatctttatttgcgggcggttttatttccggcggcaaagcgaaagaaaaaggctggatgatcggagcgttaaccgccgtttgtttctcgttaatcatcttgctgtttcaatatttagggttcggaaaaacgtttacatccgggcagcttttgtttcacctcggctttttgggagtcagtatgctgggcgggattttcggagtgaatttgaaaggaagcagatcagcgtaataaaaaaaagagcggattctccgctcttttttagtatgtatgagcttcgctgttactcagcggaagcttctctgattgcgcggcggtcaaaagttaaacgggtgttatcacctgttttaatgacgaccttgctctcatcaattgaatcaacagtgccgtgcaatcctccgattgtcaccactgaatctccttttttcagctcttcctgcatctggcgtacagccttctgctgcttttgctgcggacggatgagcaggaaataaagcactgcaaacattaaaataataggaacgattgtacctaaagtacccatctgtttccctcctttcaaaaatggtttttatttagaagcttttcgcatttggcttattatagccgtaacgctcaaagaactcttctcggaaatcaccaagacgatcctcccggatagcttgtctgacctgctccattaagtgtaacagaaaatgaaggttatggtaagttgttaatcgaattccaaacgtttcattacagcggatcaaatgtctgatgtaagcgcgggagtaatttttgcatgtatggcagctgcactcttcgtcaatcggacggaaatcgcgctcatatttggcatttttcatattcaggcgcccttcactcgtgaacaccgtgccgtttcgggcaatccgggtcggcagcacgcagtcaaacatatcaacgccgcggatggcgccgtcaattaaggcatccggtgaacccacacccattaaatatctcggcttgtccttcggtaaaagcggagttgtaaactcaagcactctgttcatgacgtgcttcggctcgccgacagataatccgcctatggcatagcccggaaaatcaagcgaaaccaagtctttggcactttgtgtccgcaagtcttcgtactctccgccctgtacgattccgaacagcccctgctcatcagagcgtccgtgcgccttcaggcagcgttcggcccagcggctggtccgttccacagagcgcttcatgtaatcatactctgccgggtacggagggcattcatcaaacgccatcatgatatcggaaccgagggcgttttgaatttccatcgctttttccggagataaaaacagcttgtctccgtttaagtgattgcggaaatgaacgccttcttcttctatattacgaaacttacttaatgaaaagacctgaaaaccgccggaatccgttaaaatcgcgcggtcccagttcataaactgatgaagcccgcctgcttcttttacgatgtcatgtcccgggcggagccataaatggtacgtattgcttaaaataatacccgcatccatagatttcagctcgtccggagacatcgtcttcaccgtagcaagcgtgccgaccggcataaatacaggcgtctcaaaggagccgtggggcgtatgaactctgcccagacgcgctcccgtttgtttgcattcctttataaattcataacgtatcggttgttcagccattttgtatgaggcctcctgtcattcaaattagataatcagcatggcgtcgccaaagctgaagaaacgatattcctcttctaccgcatgacggtaggcggaaagcacatgctctctgccggcaagcgcagaaacaagcatgataagcgaggatttcggcagatgaaaattagtgatcatgccgtcaatcgctttaaattcatatcccggataaatgaagatggacgtccagccgcttgaagcggtgaatacgccgtcatgctcgccggcaatggtttcaagggtgcgcgttgatgtcgttccgaccgacacgatgcgtccgcccgcctttctgacctcatttaaagaggcggcggtttcttccgtcatttcataaaattccgcatgcatgttatgctcttccacatcatccgcactgactgggcggaaagtgccgagccccacgtgaagggtgataaattcaatccgcacgcccttttgcttcagctcgtccaggatctcttccgtaaaatgaagtccggccgtcggggcggcggcagaaccgatttcttttgaaaagacggtctgataccgctctttatcatcaagctgctctttaatataaggaggcagcggcatttcaccgagagattcaagcacttcataaaaaatcccgtcgtaccggaattttatttttcggccgccatgatcaagctcctccgtacagaccgctgtcagccggccgtcgccaaatgtcagaatcgtaccttttcttacgcgtttcgccggctttacgagcgtttcccatgtatcgttttcttcctgttttaataaaaggagctccactttcgctcccgtatcttcttttgtgccgaataatctggcgggcagcacacgggtattgttcaaaacgagacaatccccttctttaaaaaagctgacaatctctttaaatgaactgtccgtcagtccgcccgtctgtttgtcaagcaccatcagccgcgatgcgtcacgctctttcagcggcacttgggcaatgaggcgttcaggcagttcaaaatcaaataaatcgactttcatcatttcacctttattctgtctattgttatttcattctgccgaaaaaattgagcagaatggatagtatcacactgatcacaatacaagtgacaacgggaaagaaaaatgtgacatttcccttcttaacgaaaatatctccgggcagccttccgacaaagtgccagactgcgccgacaataagcaaaacagcaccgagaaccatgagaatcttcggaaattcagtcacaggcgggtgcctccaatcgaaaatgctcatacacagccggggtcacgacccgtcctctcggcgtcctttggagaaatccgatctgaagcagatacggttcgtacacatcctctattgtatgcggttcttcaccgattgtcgcggaaatcgtatcaaggccgacgggaccgccgctgaatttttcaatcatgcccatcagcagcttatggtcaatatggtcaaggccgagtgcgtcgacttgaagacgttcgagcgcgtcgtgagcgatttcttccgtgatgcggctgtcacctagcacttgggcaaaatctctcacccttctgagaagccggtttgcaacccgcggcgttccccttgaccgtctggcgatttccaaagccggggcttcttcgatttcaacttcgaatacttcagccgttcttgacacgatatctgtcagttcttcctgcgtatagtattcaaggcgggacagcaccccgaaccggtctctgagcggcgcggtcaataagccgaccctggtcgtcgctcctaccagcgtaaaaggcggaaggtcaaggcggacggagcgggcggacgggccttttccaataacgatatcaaggcagaagtcctccatcgccgggtacagcacttcttcgattgaccggttcagtctgtgaatttcgtctataaacagcacatccccgggttcgagcgccgtcagaatggctgccaagtctcccggtctttcgatagcggggcctgacgtcgtccgcatctccacacccatctcattggccacgatagacgcgagcgttgtttttccgagacccggaggcccgtataaaagaacgtggtcaagcgtttcctgcctcattttcgccgcatcgataaacacgcgcagattttcttttaccttctgctgcccgatgtactgggcgaggttctgcggcctgaggctttgctcgattattgattcatggctgtctgcttcacttgaaacgagccgttcatccatgaacatcaccttactttaataatttttgcaatgcttttttcacatattggtctgttgaaagcgccgtttcctcttttaagtgaggaagcacttttttaatttctttttcggcgtagccgagtaccctgagcgcttcaagcgcctcatcaagcgccgtttcagcctcttgtttttcaatgcgcgcttcatgattgaacaggttgtcaatcatttcaggcacgacatcggccagtttgcctttcaaatcaagaataatctgccgtgccgtttttttgcccacaccaggaaatttcaccaaaaaggcttcatcttcctgttcgatcgcttcgatgacggctcccggatcaccggaaccgagaatggcgagcgcccctttcggaccgatgccggtgacattcagcagctttgtgaaaagcgctttttcttcccgggttgaaaagccatacaaagaaaaggcgtcttcttttatatgatgatacgtaaaaatggtctcttgattgcttaccttataaataaacggattcggagtgaagacctgatagccgatcccgccgttttcaatcacgatgtattggggcgatacgtaatcaatcgtccccttcacgaattcaatcacacctattcacctctttgactgcttatcattgtaacacaaaaacagccaaagtcttatagaaaagttaacgtatgttcgctttgacacttttcattcagaaaaaaaagacatgtgtaacatgtcttgcgtcaaagtcagccgctgtaagtcttaatatgatcgatcacgctctcaaactccgcttttgtcctgtacggtataccgtgttccaagtgcttttgcaatcggctttccagccgctctaaatcaatctgaaagaaagactggatcggttccgccagcgatccgggacggccgtgaaaagtggaaatgacgcccccgtctgtgacaccgatataaccgtttactttactgagcggagaaatatcatcaacatgcttacggaaaaggacgaagccttttttttgctcaacgagcgtccagccggcatatgcggcccaaaagtcctccatcgccaaaacggtttcatccgtatgctcaatgccgacatcaccgtccagatagaccttctccagctggacatgcacccgaagcggcccgtaatgctcaacctctgccccgtatgcggcgtttcctccgcaaatcaggactgctgctgataagataagcataatcaaaagacgcacaccgcaaattcgtttcaccaataacacctctttattcaatcaaactcttgatgctagtttgaccaaagatgccggtgcttaatcgttttctttctattgtctgtttcagccgaaaaaaacagccctccaaacggaaggctgccccgatgattaagcccggctggctgaaatcagtttcatttgtccgggcgtcagtttgaggcggtatcctcttacagtcagatacacagtttttgtcccgctgctattgtcatgctctgtttttttcatcccggcccctccgttacgttttatattgtttttatgataacagcgcaatataaatagcgttttaaaaatatgtaaagaaatgatgaaaaaatactgccggatggaatcatccggcagtctaagtctaacggctgtttttgttcatgtcttgaagcttcgtaaaagtcgcgttatcggtaaacacttgaattgtgcggccgtccgcgaattttttggctgcatgcttgacatgtttatcatcattttttgtaaatggatgatttgttctgacagcaatgacgactctcgtgtcagtcacgataacctgactgtcctgtacgccttttactttcttcacgcggtttgcaatttttgccgccattctgatgttttcggcattgtcgtacccattataagacatcgcggccggcggcgtattgacgttgcggccgttgtatgtgccgtccgttgttaacggaaccccgttattcggcgtattttggtaagacacgtttgtcgtatttcggcggccgtttcggttttccatcatttcagaaacaggtccttgatggtccatgccgtactggcgtctgccgttatcattatcatttgaataatacccgaccggacgtgttgtctgattgtagcgtccgtcattcatggcattatttgctccgcatgccgttaagcttgccgtcacggctaaaacgcctgcgatcgtcatcaattttttgcccaatggaaaaaccccccgtggattcatcgctgtgtgagcgttttttcgctcatgtttaggatgtgcggccgacggcgggtttaagcttgtcagttatgaccattccacatttggacataaaaaagggaacgacatacatcgttccgaaacatcaatcttcttcttcctccggccgtccgaatacttgatttggactcggctgattaggcgagacattgggatttgctccgccgtaaggcataaaatatccggcatttgcccccacattcggaaatggctgcacaggcatatttgcgtgatgatgatgagacccgtggtgatgatggtgatgatgtgaattatcatgacagccgcaatcatcatccttatattttccatcgtgatgaggcgcgtttgcgtgatgtgacggatatccgccgtaatacggcatgtgagcgtacgaagcacctccgaaaccgccataatgctctgcgttttcatgagcctggttttcatattcaccataaccgccaaatcccggatggaatccgtacgaatatggcatcggcattaccggaaagcctccaaaaccgccgaaaccgccgcctaccgggaagaacgggtggcataatcccgaacccggcagcatcggcgtcaccggaaccggacaaggacaaggcatgcacggcatcgggtaatgcataaacggttcaacggccggcatattcggaaacgggacattcggaatgtttggcatattcggcagatgataagcggcgttttcttcttccatctttccgacttcaggcgcctttggcatattcgggtaattcgcgttttccatgttgatcattgcctcctgttgtggaatgttattgtcatactccttctctttcggctcgacaaaatgagtcaccggttcctccggcttaggaggcgaccacggctgaaacagctgattggacggataatgttgattcatatcagcttccggcagcacattttcatgtttttcagggatcggcggcacatacggaattgacggctttggttcttccgctatggtgtcttcgatgtccacaactgatttcggtttttctttagcatatggatgctcatgcttatgcgcagacgttccgaagtttgcttttggttcttttctgaccggaacggcttctgaaggcacctttatcttcattccaggcataattaagtctggattgcttagctgattattcaatttttttaattcttcaaaatcaactccgtatttttcagctattttccagagcgaatcgcctttttgaacgatatgaattttcaacgttttcccctcctatgcacaaaacgtgaacggtacatttgtcattacaatacgtttcttcacactatatgcaggcgagctgggcatgatgataaaaaatttggaaaggaggggagttttttatttttacgtatggctcagcattctgtttaaagcacgaagcgcttctgtccgaaccgctttcggcactttaatgacacctttcggctcgcctttttcaagctgctcaagcgaccacaacaaatgcggaaggtcaattctgttcattgtcagacacggacacatatccggattcagtgattcaatctgtttatccggatgcgagtgaatgaggcgctgaacaagattcatttccgtgccgattgcccacttgcttcccggttcagcctgttcaatcgtatcaataatgtatttggtagatccgctgtcgtcactgagcgagaccacttcccgcgaacattcgggatgaacgataatacggatgtcagcatcccgctgccgcagctgagagatattttccgctgtaaacttttcatgtacggagcaatgtcctttccaaaggatgaccttaatattttccgggtgatcagtaagcaaacggttctgcgtcgggtcccatacggccatttctgtcagcggaatgccgaggtcataagctgtatttctgcctaaatgctgatccggcaaaaataaaattctttctttttgtttaaaagcccatttcagcacgctcctggcattcgaagaggtgacggtcgccccgccgtgccgtccgacgaatgctttaatttccgccgtcgagttaacatatgttaacggaatgatggtgttaccgtacagctcttgaagctctttccatgctttgtccgtctgctgtatatctgccatatcagccatcgagcacccggcgcgcatgtcgggcaaaatgacggtttggttatcatcggtcagcatatcagccgtttccgccataaaatgcacgccgcaaaacacaatgtattccgcatctttatttttttcggccacttgggcaagctgcagggagtcaccagccgtatcggcgaattgtatgacttcatctttttgatagtgatgtcccggaatgaacaggcgctttccgaaggaccgtttaatttcggcgacccgcttctccatttcacgggtgctcatgtttttataatggctcggcatcatttcatctgatgcagttaacacgtcaaaaatagacattatgaaaaatccccctgttctgtcgcgacatccatgctgatatcggcgctttttactgaatgagtcagaaatcccagtgaaatatagtgtacgcctgttcctctataatcgggcaatgtgtccagcgttatgccgccggatgcttccgttttgatatggcccggtgtcatgcctgcaaaacgccggacggtctctggcgggcagttgtcaaacataataacgtctgcgcctgcgtctattgcctccagcagctgttgttcggtttcaatttccacttctgccgcaagcatctgccccgccgcttttcgcgcccgctccatcgccgcttttatcgatccgcaggcggcaatatgattatctttaatcatgatgccgtcatataagccgaagcgatgattacagccgcctccgattcggaccgcgtatttttccagcattctgagcccgggtgtcgtttttctcgtatcgcaaagcttaatggacggatcatcaagacgccttttggcctcatccgtcattgtcgcaatgcctgacattctttggataagattcagaatgacccgttctcccgttagaagagccgccgccgggccttctatttcagcgagcacgtcttcttttttcatccgctctccgtcttttttcagggaacggatgcggatgtcattgtgtaaaagcccccatccttcacggataacggcttccccggcaaacacgccgtccgtttttgcgatgatcttcgccttacaatgctcatcagaaaaaatcgcttgtgacgtcacatcacccgttccgatatcttcctgaaaaaaacgtgtcagcatttgtttcagctgcagaatgtccatatttccccaatcccttcgttttttctgataactgttcctgatgttgaatgaatgatttgttttccgtgccactttttctctgccccgggaaaatcagcgcgataatgagcgcctctgctttcttcccggataagagcagaggacacgacgagttgtgcagtctgccataagcaggatagttcggcttgttctattgtgatatccttcacatttatatgatgcacagatactttgttaagccaggatgccagcgcctgcatgttttctttctccctgatgatgccggctccgcttgtcattttggcttggagcatgtgaagcgttgtatccggcacttgtaagatgacgtcagatttcttcgaagctttttgatatcgtccatttaatggcgtttgcgtgatatgttcagcacatctttgtccgcttgccagcgcttccagaagtgagttgctcgcaaggcggtttgccccgtgcaaacctgtacaggcggtctcgccaatggcataaagatcaggcacagacgtttttccccatgtatcggctcttactcctcccattaaaaaatgcattcccggagctacgggaattccgctttcaatatcaacacccgctgatttacaaatgcctgatatggtcggaaagcgtttgttaaagtcagctatgcggctgcaattcataaaaacggggttttctttcattatttcttcaaaaatcgcccgtgacacgacatcccgcggcgccaaatcttcaagtgcgtgtctgcccgccatgatcctgcggccggagcgatccgttaaatatccgccttctcccctcactgcttcagaaatcagcccgtacgcagtcccgcttttcacaaggagggtcgggtgaaattgggtgaactccatatctgtgatctcggctcccgcacgaaaggcaagagtgatgccgtcgcccgttatggaggaatcatttgtgtgatactgatacagactgccgcagccgcctgatgccagcactacacaatctgctcttctgtaagaaactgaacctgaagcatcctttacggcaacgcctgcgcaccgtccgtgttcaatcaaaagatcaaccgccgtttcgtgttcaatgatccggattccgtccctcagctgctgaagcagaaacccgaccaaaatccgcccggttgcgtctcccccggcgtgaagaatccttcttttggaatgagcgccttccctgccgagacaaaacgttccgtctgatttcatatcaaatggaaattgatcttctatcagcctgtttatcatactttgtccgctttgcagcaaatgccgcacggctgtcacgtcattgtgcccgcatcccgcatacagtgtatcgtttacatgggattcaatggagtcatctgttgcgtatgaaacggcaatcccgccttgagcataatgcgaattgctgttcgttacgtttcttttcgtaatgacggtcacttggtatgacggaggaaatgaagaagcacaggcgagggccgccgtccccgaaccaatgatgataattgttttttcagacatacatcaccctcctgttttatttacacctgtcttgacacctatatttacacaacgataaaataaactcaagctttttttaacagaaacggataggagacggcctgtatgatttatcttgattacgcggcgggaacgccattaagcaaagaagccgctgaagtctttcagcagctcagtacagaggtatacggaaatgcaagcagccttcatgacgccgggggaagagcggcggatgtgctggaatattgcagacagtctgcaggaagattgatcggcggtgcggcagacggcatttattttacaagcggcggcacggaagcgaacattctggccgtccaatcattgctgcatggtctccccgcaggcaaaaaacattttattacgaccgcaatggagcaccattcgatccataatgccgcggcgtttttagctgatcagggcattgacgtcactgtcatttatcccgacaaaaacggccttataaccgaggacattcttgcggctcatgtgcgtcctgacacggggctcgtttccatacagcacgccaattcagaaaccggcctcatccagcctgtggaacgtctggccgcttttctccatcagagaaacatttttcttcattgcgattgtgttcaaagtttcggcaaactgccgattgatgcggatcaggcgggaatcgacgccctttccgtctccggccataaagtatacggcccgaaaggcaccggggctgtttacattcggcccggcatcagctggaagccggtttatccgcataccgtgcatgaaaacgggttcaggcccggtacggtgaatgtgccggctatcggcgcttttaccgcggctgcggagtatgcggtgaaacacatggagaaacaccgtgagcacgctgacaggctgaggaattatttttatgaacaaattcggctgcagggccttcccatttcattttcggaggaagaaaccggcggtgaatgcctgccccacatcatcgggtgtttttttcactcctttgaaggacaatatgttatgttagaatgtaatcgtaacgatatttgcatctcaaccgggagcgcatgttccgcaggcagtcaaggcccttcttcagctatgaaggcgctgaggaaaaccgaacgggaagcgcggcagtttttccggatctcattcggaaatgaaacaacatgtgaacagcttgatatgctgatacatacattaacggcgctatgggagcaaaagaaaggagaatcagcaatttgacagaaggaacgaagctcacgggggcgaaaagacgcgacatgctgcttctttggctgaaagaagccggctcaccattaacagggggcgaattggccaaaaaagcaaatgtctcaagacaggtgatcgtgcaggacatatcactcttgaaagcaaaaaacgagccgattatcgcaacaagccaaggctatttatacatcagcatgaacgccggcagcgaaaatcatgttgaacggattgttgcctgtctgcatggcccggagcgaacggaagaagagcttgaactcattgtcgatgaaggtgtcaccataaaggacgtcatcattgaacaccccgtatacggcgatttaaccgccgccataagagtgagcacacggaaagaagtcaaacaattcatgaaccacattaactcgacaaatgccgcgtacctttcacaactgaccgaaggcgtgcatctccatacgttaagcgcaccgacaaaagagcggattgaccaagcatgccaagcgctggatgaggcagggatattaataaaagattaaaaaaaagccctctgaaagggctttttttatatggaataggattgatatgttcccagaagcttgacccggcagccgagggcttccatctcttgaacggcaccgggaatcagcacctgatccatcgcctgttcaatatcaataataaagaaatagttgccgagacccgtttttgtcgggcgcgattcgatctttgataaattaaggtttctccatgaaaaagcggacagcaccctgtgcagcgcgcctgattggtcatcttggggaagcgtcaccatcatcgtcgttttcggccgtgaagacagtttcgcactcacttcaaatgatacgtctttttcaggtgaaagaatgacaaatctcgtgtggttatcctgataatcctgaatgtcccgcctcacgatgctcaatccgtatgtagcggccgccatttcatttgcaatcacgccgatcggaagttccgggtgctcactcacatacttagcagccgcaccggttgacttcgcatactcataaggaacggccgaaaaatgccggtgaagaaatttgtggcattgcgcaatcgcatgtgaatgagaataaattttctcaagctgtttccactcattttctttcgaagggtgaacgagcaggtgctggtggatcggcagcgtcatttcccccacgatcgcaaggggctgctcatgaattaagtagtcaatcgttaagttaacagagccctccagcgcgttttccaagggaacaaacgcaagatcaacttctcccgcgaccgccgcatccatgcatgccggtattgtatgataaggtgcttgtgtcacgctgttttgaaagcaggaactgactgctagatgtgtaaatgtggcttctggccctaaataaccgactttcatgtttctcttctctccttacgcgcctgaccctaagatctcaactttttctataaaatcaaattttctcagtttattcattaacgtatgaatgttttcttccattgcggacgtgctgattgagagcgtgacatttgccctgccctgaagcggaatcgtctggtgaatggaaagcacgttgcttcctgagtcagctaccgcctgcaaaagctgtgataatgcgcctgaccgatcctccaaatgaaagaaaagtgtgattatttgttctttaaccatggtgtaaaaagggaaaaccgcatctcggtatttgtaaaaagcgcttctgcttaaatcgactttctgcacggcatctgcaactgattcagccttttttctgtccagcagctttttgacttcaagggttttccgcatcgcatcaggcagaacgtcttcacgcactaaataaaatgtctcttctttcacctgcacccctccctcttacatcagagagcctgcatcgcaagctctccgtctttttaatcaataaattcaaattcaaattcaagaagccggatgatatcgccatctttagcaccgcgttctctgagcgcttcatcaacgcccattccgcgcatctgtcttgcaaaacgcttgacggattcgtcacgggagaagtcagtcattttaaagaggcgttccaggctgtcacctgaaagcacaaatgcaccgtccggatcacgggtaatgttaaatggaatttcttcgtcttccatcgtgtacatcacgcggttttccgccagctcttcttcatcatagagcgggaattcaggcgttgtttccagctggttggcgacttcaaacagaagatcgcgaagcccttctcttgtcaccgcgctgatcgggaagactgggtggtcatcctgaagcttttctttaaacgctttaagattttcagtcgcctcaggcatgtccattttattcgcaacgataatttgcggacgctccgtcagccgcaggttatattcactgagctcctgattaatggtcacataatcctcatacggatcacggccttccatcgctgacatgtcaatgacgtgaacgatgacacgcgtccgttcgatatgacggagaaattggtggcctaagccgaccccttcgtgcgccccttcaatcaggccgggcagatccgccatgacgaagcttcttccgtcatctgtttccaccatgcccagattcggaacaagcgttgtaaaatgataatcggcgattttcggctttgctgatgaaacgacagacagaagcgtagattttccgacgctcgggaagccgacgagacctacgtctgcaagcaccttcagttcaagcacgatatagcgctcttttccgggctctccgtgctctgacagctgcggtgccgggttggccggtgtcgcaaagcgggtattcccgcgtccgccgcgtccgccttttgcgatgacggcgcgctgtccgtgttcagtcagatcggcaatgacctgttttgtgtcgtcatctgtcacgactgtaccgggcggaactttaacaaccatatcttccgcgtttctgccgtgctgatttttagacatgccgtgctcgccgcgtatcgctttgaaatgccgctgataccggaagtccataagcgtgcgcagtccttcgtccacctcaaaaatgacgtcgcctccattgcctccgtcaccgccggcaggaccgcctttcggcacgtatttttcacggcggaacgcaaccattccgttaccgccgtcgccgccttttacatatactttcacctgatctacaaacataatatcctccgttctaaaccgtaaaaaaccgctagttcattccaatttcggccacacattcatggccggtcagctcaaattgcatgacatcaaagtcctcataccgcgatttgcgaaattcatcaaacacatctgcattagcaatcgttccatgaaaatcgagatatacaataagctgtctgtcagggtgatccgtctgcagcgatacggtcagatgattttcactttcattgcttaccgccagcccgaacagatgaaacagttttctcatcaggttcgacagcttttgatcatatgccgataaatcttttatttctccgagcacttcgtattcgagcctcatataacgggacttccaattaaatgtcaaaaagtcaaacgccaagtgcggggttttcaggtttgagagctttgattcgtgttttgcatctatgaccatttcgtcaattatttcaacgaccctgtcatacttctgcaaacttaagtttccttttatcagctgcagcttattcatccaatcatgacggaaatgacccattaattggatcagctcattgatcagagccgcctcgcttacaggttcttcttgtttcttcgatacatccttcattttcgcactcccaatcgtttaatttctttttaggagtcttgataagtgtgtactatgaattataacagagaaggctttgttagaaaaacacttgtttttcctggttcatcatgttcctttttcggatcgcatgcatgcggatgccaggcagaaacatttttggtatcactgcttggggaacatatccagtgggtatgagaagctgatgtcctcattcaaggcggggttcactcacgcgtcctctgcttttcattcttgatgttactccgcttactgcaaaaaaaactccagtcaacgaccggagttttttgtgtcattattgagctacaggatatacgctcacttttttgcggtcacgtccgaaacgttcgaatttaacagttccgtcgattttagcaaaaagagtgtcatctcctccgcggcccacgttttcacctgggtagattttcgttccgcgttgacggtaaaggatagatccgcctgttacgaattgaccgtctgcacgtttagcgcctaaacgtttagattcagagtcacgtccgttctttgtagaacctacaccttttttagaagcgaaaaactgaagatctaatctaagcatgtaactcacctcctatatttggtttgcagtcaaccgtaagtgttcactgtaatcccgttcgatcgtttcaagagaaacaatcatgccttcaatcagcagctgcgctttttgcaaagcttcctgatcagcggattcagggaattcaaagtagaaataacccccgtcctcgcctatatcaagaatcggttcgagaggagccagcgcgataaccgcattgaccgctccgaaaacgacagccgtgaccccggcgcatacgagatctcgtccatgttcagcaaaatcggcatgtcccgtcatttcaaaggacaaaatgcccccgtcattccgggatcttcgaattgttgcctcaatcatgcttacgcgttgattttttcgattgtcaatttagtataaggctgacgatgaccttgttttttatgaacatttttctttggcttgtaacggaaaacggtgatttttttcgcacggccttgtttttcaactttagctgtaactgtcgcgcctgcaactgttgggttgccgactttcacgctgtctccgccaacaaacaatacgtcttcaaacgtcactgtttcacctgcttcagcagcaagtttttcgatgtaaacagtttgaccttcttcaactttgatttgttttccgcctgttttaatgattgcgtacattctctgcacctcctattagactaagactcgccagcaacagggggctttaaagctcttatcacctgtcccgagcggttgtagcattggtgctacatccataacattaaaaaatatatcagaaccaaaaggatatgtcaatctatttctagtaaggcagcagcaggtcttccatggaggaatctgtccgtttatcggcaaaatatgcatgaagcacttcattttcatcaagctggctgagcttctcgccggctttttcaatgataatgggatgtttgcagccccgtttgaattcagccatgacatgctttactttggcatcggccgcgaccgtcaaaggatgcagcatggcgacatcgcggtttttgccgtaatatctctctaaaagaaacctcagctgaatataatgccgctttcggtattcatcccataaggaagccgcgagaaagacgaacagcacccatgcactgacctgcagggggacggccagtacaatccagccgcagagcaaaagcgcggaaacggccgaagtctgcaggctgaggagatgcgctttttgaaaagccatttgtttagaaaagtataagaacacgaactttccgccgtcaagcggccagatcggcaacagattgatcaaaagaatggagagattataaaaggtaaacatctcaaatgtctgctgacttgcaaagccggagatgaaaaggagccaggctgccgcctgaagccacacgtgctgaagcgggcccgccagaatgacagcaaattcttctttcagcggccggtttccgtgctcttccacctcaaccgtcccgccgaaagggagcaaaaagacgcgtttaatgcgccacgaaaaaaacacagccagagcagcatgccccagctcatgaacggatacgaccagcaaaagacacaagagcgctttgatgtgccccgtcagaaaaccaagccccatgataatccaaagaaaaggatggacatgaattttgaaaagaaggctgagccatttattcatcaaatgtgatcacctggatcggatctatgaatttatcgccatcctgaatcgcgaaatagtactggcctttacctttatcgctgagcttgatcgaaccgatctttttccctttatcgataaagtcatacaatgatacgttaacatctttgagccggccgtaaatgctgctggtattgtcggcatgctgcaccttaaccgtcagccctgtttttttatctttgctcacttccataatgtacccttcttttacgctgtcaatggcttcactggccgtttcgacaacgacgccttctccgttattttgaaagttctgctggattttccccgcggcaggaacggccatctcctggctgaccgccacctgaccgtctttcttttttgttcccggagtgagaaatgcgagcgggtttccgaaggaggatacaaaccaattgtttacggcagcaaactgaaattctttttgaaaagtctgtgcgatcgccggtttgatctgactcagcggctgtttgtcagttttataggcgatagcggaaaccagcacgagacaggcggccagcaggcattttaaaataatagaattagcgctgatcaatggatgccgtccgttgaattcgggcggatgttccgtttgatattcatagttcggaagaagcccgtgcttttcctgctccttggacgtctgccatgcgggaggcttctgcgtctgggcgttatgcacgaaagtccgttttgattctgggcgcggttttctccttttggccagtctttttctaatttcatcagctctgtgactcatcgctatcatcctttgcaatcgttgggtttgtacatcctatgccttgtccattgcaaatatgcgccctgttgaaaaacaaaaaagacctgataagctgggcttcatcagatctttgtattctagtatatttatgatcgcacgccgaaaaatgacttaattttcgccatcatccctttttgctgctcttcaagcacctgcaaaggaacggattctcctaaaatgcgccgggcgatattgcggtaagcaatgctggcgcggtttttggaattcatggcaatcggttcgccgatatttgaagctctgatcacttcatcatcgtcagcaacgatcccgaggagatcaatagacagatgatgaacaacctcatccacatccatcgtatcaccgtttttcaccaggtgatttctgatgcggttgacgatgaggcgcggcggttcgatatcttcctgctccaaaagtccgataatgcggtcagcgtcccgcactgctgatatttccggcgtcgtcaccacaatcgccttatcagctccggaaacggcatttttatagccttgttcaattccggccggacaatcaataatgacgtaatcaaattcctgcttaagctcctgcacaagcgatttgatctgctcagggacaacagccgttttgtcgcttgtctgggcagccggcattaaatgaagcagatcatcaaaacgtttgtctttgacaagcgcctgatgcgtcttgcatctgccttcaattacatctactaagtcgtaaataattctgttttcaagacccattacgacatcaaggttgcgcagtccgatatctgtgtctaccaaacagacgcgcttccctaaaatggctaaggcggtaccgaggtttgcagatgttgttgttttacctactccgccttttcccgaagttattacgatagcctcacccaatttcacattcctccctcaagccttgttagatcaggtcttaaatgagccaattgctgaaggcgttcaatgaccatatttccgtcagtatctaaataagcacattccatgtcgttccctttttgaatgtggtctggggagcgatttaacacgtgattgatcctcaattgtgtcggcatcatttcggatgcggcgatcacagcccggttatttccgttataacccgcatgggcaatcccttttaatgaaccgagaacaaatatatttcctccggctctgatcgtaccgccgggattcacatctccgattaaaagcaaatctcccgtgacatgaagcacctgacctgaacggacaattttagaaacagaaacaatttcctgctcctctttcatccgcttcgcttcttctttggcgatgacttcactgtcaattgaatgcacgactaaatctttctttgacgcgatcagttcagtaagctgctctgcctgttcctgatacagataccgatgcccgagtttaatatgaacactgattttttggcctttgccatcagtatattgttcaattgacagcatattttgaagaccatcaagtagctcatcaaaagaacacgcatcatcaagatgtaatgttaagccgttttttgttccttttattgttacatattgctgctttttggtcttcatcaatgttcacctcaacaacatactcttttcgtcaaaaaaagataaaatcctttttactcatctcttaattctttcttcagacttatataaaacagcctaaagggcaggactaatataatggctcccgcaatattcagcacagcagtcggcaaaaaccgctgaatgacaaaatcgttaaacgtcattgtaccgctgcggattaacgtctgaatgccgtagacgtaaaattcaagcacacatacgctcagcacagcgaccagaatgaccatcagggcgtttgtctgcaacaccttaaacgctttggccgccaggtagcataaaccggcaaaaccaaacatataaacgcctaaaacacccgtataattgatgtcataaaggagtccgaaaatgaaaccgtagatcaccgcatgcttttggttgatataagcggacataaaaatcagcgcgagcaaaagaaagtgcggaacgacctgctgctcgtcggaaacgaacggaaaatgcaccagatctgtatagatgctttccgcacaaaagaccacaatcataatcaaagggagaaggaaacgtttcacgatccttcctcccctgttgctacgcttcggttcacgacgatgacatggtcgagatcatacagatccgcagccggtttaacgtaagcgattttcgtcaggccgtacgcatccgattctacatctgttacttcaccgaccgtcagcccttgaggaaatacgccgcccgttccggaggtttccacaaggtcgccttttttcacttcacgtttgtcatccggttcaaggatggtcattttgagagtctgcttctttttgtcatacccctcaattaaaccgtagcctttgcttccctttttgccggagattttggtggccactctgttattgcggtcaacatcgctcagcagctgaacggcggatgtgaaactgttgagtccgctgcttttgatcttcccgacaagcgcacccttttcgtttgtgacagccatgtccttggccactttctgcttcgttcccttattgatcatgatctgcttgtaccattgatcaggatttctggcgataacggtcgctaaaatcggttcatagtcggaaatcgacttgacatgcccgagttcatcacgcagcttcttgttttcatctttgagttcttggagcttcgcttcatattgcgtctgtccgtccagcttttgtcttaagcgttcgttttctttgtacgtgtttttcaggtcttttatgtccccgaagaaccctgcaaaatattcggcaggcgtgtgaaaaatattttgaaatactcccgtcgtatcaccgatcagcttttcaggccaggtggtattacggccgttcttcagcgagaatccaatcatagccaccaatatgataatacacagaagtaatagcattaaccgtttattcggcatcgtgatacacctcttctatttaactcctgattatcttgtttttcctttgaaaagatggatgtgctccagtgcttttcccgtgccgatcgcaacacaatccagcggatcttcagcgataagaacaggcattttcgtttcgtcgctgatgaccttgtcgagattgcggagcagggcgcctccccctgttaacacaatacctctgtccataatgtcagcggccagctcaggcggtgttttttcaagcgtgctcttcaccgcgtcaacaattgagagaactgtatcacgtagcgcatttgcaatttcagttgccgtaatttcgatcgttttcggcagacctgtcaggagatcgcggccgcggatttccattgacgtattttcttcaccggtttccgctgagccgatttccattttaatggcttccgcagtacggtcaccgatcatcagattatatgtttttctgatatagctgatgattgagtcgtccatttcgtcaccggctacgcggattgactgagacgtgacaatgcctcctaaagaaatgatcgccacttcagttgttccgccgccgatatcaacgaccatgctgcccgtcggctcccataccggaagattcgcgccgattgctgccgcaaacggttcttcaatcggataagcgtcacgtgcgccagcttgtcttgtcgcgtcgataaccgcccgttcttcaacggcagtaatacctgacggcacacacaccataacgtacggctttctcgcaaacaatcctttatttttcacagcctgattaatgtagtatttcatcattgtcgcagttgtttcataatcagcgataacgccgtctttcatcggacggagcgcaaccacgttgcccggagttcttccgatcatgtttttagcatcgttaccgaccgcaacgattgatttcgtatccgtttgcagagcaaccactgacggctctctcactacgattcctttacctttaacaaacacaagcgtattcgcagttcccaaatctataccaaggtctcttgtaccaattccgaacatatgtatgtatcttcctttcttaaagcaaaaataccctaaagggaaaaactcataaaatctattatatcttaaatcaacgaaaaaaaaagtgttacaaatatcctttttcctttaaactcacaaattttttgtcaccaatgaccaaatgatccagcaactcgatgccgattaaatttccgcactcaaaaagccgtctagttacttctatatcttccctgctcggtgtgggatctcctgaaggatgattgtgaacgcaaatgaaggacgcggcggatcgtttgaaagcttctttaaacacctcccgcgggtggacaatagatgaattcagacttccgataaaaatggtgcgtttatgaatgacttgatttttggtatttaaatataaacagacaaaatgctcttgggataaaaagcgcatatcctccatcacatacttcgccccgtcttcgggagaacggatgacgcaatgctctccggcggatgtcttatgaatacggctccccagctcaattgcagcaaggatctgaacggctttcaccgtgccgattccggggatgctggaaagctcctgggcagaagcgccttttaacaggcgcagcccgtcaaacgtccgcagcagccggtgagagagattcatgacggactcatgtttcgttcccgtcctcagcagaatggcgagcaattcattgttagaaagatgttcggccccgcaatgcagaagccgctctctcggtttttctttttcggggaaatctcttaattttaacggcagatcacggatgatcaacccctccttgttccccttcccggtttgaacatcaagcttttatattaaattctttcagggctctcattgttttagcgacaggcagcccgacgacagaatagaaatcaccgtctatttttttcactaaaagcgcgccttttccttggatgccgtatgcacctgctttatccatcggttcttttgtttcaatgtagagctgtatttcgtcttcactgagcggccaaaatgtcacttccgtcttgtcacagaacgtttctttccggtcatgcgtctgaatgctgaccgccgtaatgacttgatggcttcggccggaaagcctccgcagcatgtgtgccgcttcttctctgtcacgcggtttgccgaggcattcaccgtctatgcacaccatcgtgtcagccccgataacgactgcatcgggattttcggccaatacagcaccggctttttgctcggccaaacattggacgttttcttccggcgaaaggtttcgatttaatttttcatctgtgcggctcgcaataatgctgtaaggaatctgaagaagattaaggagttcttttcttcgcggagattgtgatgcgagtattaagcgttttgtcatgattgtcatcctttcagggtttgcttaagaaaaaaagatactcgtctatcctaccaaatcaagcggacaaccacaatttcagaaaaataactttttgatgacaaaataaaaaatcccgccgcatgacgggagaaagaaatattattttacaatgcttaaaagctctttctgggctttccagccggattcggaaccggacgtttccagttctttcagcgcttgaaggacggcctctttctgctttttgtcagcggcggctgcgccgtctgccgctttggctgcttcagccacatctgattttgaaatatctttgccggtaattgctttggccgagagctcagatgctagtttaaaagagtcttccaagcctgaatcgaccgcaaagctgagctcttttccgccccatgcctcaaaatcatggtctatcagcgcctgacccaattgctgtgataagcttttttccgctgcaagaccggcgatcacgtatgtgtatccgtcttcttttgccagagagacggccgagtaacctttttcagtcagctggtcaacgagcgtttgcgctcctttttctgatgaaaatttaccggcctgcaccgcatatgttttatagtttccctctgactcttccgcatttcctgtggcgcttgtttcttgcttgtcttttgatacatctcccgctttcaccgtctgcccttgtgaacctttgtcggcggaagctggagcagcggcttctttacttcccgacatatttaaggcgacgaggccgagcccggtgcctaaaacagccgcaacggcaattgtcgtgaccgctttttttacgggagaagacggctgcttctttttcggaaaatgagggcctgtgtttttcttttgatatggcgggacgactttcgggtcatcttcaaatacctcctgattcttctcatcatcccaattgaaatcttcttccttcggatcttcatgggaagctgcgatctcctgctccgccttctttgtttcttcccaatttgaaaatgtgacggttttctccccgccttcattcacatcttcttgtccatacatcgtttcttcttttccgttaatcgttactttaagggcattgtttttggctttgctgttctttttgctcttcctttttttcaacgtctcttcccccttgcattcgtcttggccgtaccttgaactgatcatggttcacactttagcataggcgaaaaaaaaaagaacaagacttttgtcgtcttgtccaaaaaacgttcgccaaatttttcaagctcctccggaagcgagtttgatgtaaaacgaaaacagttcttcaccgtataaataactcacagcgctcccggccgcgatggcgggcgcaaacgggaaaggctgctttttaccaagcctgccgcccgctgcggcgcacatcccgtatacggctccgattataacggaaagaaagaatgcaatgagtacgagcttcacgccgagcgcaaggccgatgaccccaaacagtttcacatcacctgcaccgatgcctcctttactgacaaacataataaaaataagcagaaaaaatccgcaaacggctccggcaaaccccgcataccatgaatccagcggagaaaaaatacggccgacgatgagaagcggcagaaaaaacagcagaaccttgtcaggaatcagcatatattgcagatctgtcacggtaacaatcattaatagagacagaaataacagcgcgactaacagttctcttgagaaaccgaaatgaataccggcagccgtaaataaacatgccgtccagcattccgccgccggatacataatcgacagcttcccacggcagtttctgcatctccctttttgcaggacataagaaacgacgggcaccagctcaccccaggagagcggcaggccgcaaaaggaacaggatgagcgcggcgaaataaccgagatccgaagcgggatacggcacgctgctgtataaaaaaaagaaccgaaaatcaaaccgagcaaaaacagaatcaaaagcactcagaccacaccttttctatcaatctggctcagattgtagcatagaaaaacatcatgcctgaaatggctgaaactatattttcctcataaaaacacccggcaaaaccgtaaaatggtttgccgggtatccgaagagctgtcagataagccgctttctcatttctgaaataaaatataaggatccggtaatgatgatgacatcatccgttccgtctttttgcttaatccattctgtcacactgtccgggttttcatcgaagcttttgttcgcaagactgcttgcattgtaaaggtcttttgcgcttgaagcacgcggaaaatcaaatgatacaaaatgaatggagtctgcttcggtttcaagctttttaatcatttcctgatacggtttgtcttttaatgcgctgaatacgacatggatgtttttatcagcaaagcgctgcctgatcgtttctgtcagcgtttcaacgccctcttcgttatgcgcaccgtctgcaaatactaaagggcggctttgaagccgttcaaatcggcccggccacgaagcctttttcagaccgtttcgcaatgcttcttcagaaatggcggcgactgtcaggcgattcagccattcagcggccaatatcgccaatgccgcattctgcctctgatgaatgccgatcagcgacgtttgaatgttatcatagcagttcgtttccgtttccagcgaaaagctttcaccgtacggaagcgccgcttcattaaaaagtctgcacgttttatatagcggctggcacggagcctgcttcttttcggcttccgcttcaataacgccgagtgcttccggctgattgacgcccgttatgacaggaatggcttttttgataataccggctttctgcccggcgatctcctcgatggtattgcctaaaatcgccatatgatcatgcccgatacttgtaatgaccgacaagagcggtttcactatattggttgaatcaaatgtgccgcccagccccgcttcaaaaatgacaaaatcgatatcatcccgcttcgcaaaatataaaaatgcacacgctgtaatgatttcaaattctgtcaccgttccggcatcggtcttatcgagctcatcgactatcggttttatttcattaacgagcgctctccattcctcatcagaaatcggcgtgccgttgacgctgatacgctcattgaacgtaatgatgtaaggagatgtgaatgtgccgaccgtataaccggcttcctgaagcacggatcggataaaagagacggttgatcctttaccgtttgtgcccgccacatgaatggcgcggatgttcttttccgggtgttccaatttttccatcagcctttccatacggagaaggcccggcttaacgccgaacttgagtctgccgtgaatccagctgatcgcttctttgtacgtcttaaacaatgaaatcccctcttttatacgacaaggcggtttcttaggaaaccgccccgctggtttatcagcctttcagctctgcaatccgctgccggacagcttcgcgtttcgccgtgtagtctttctcttttgcgcgttcttcttcaatgacatgctcaggagcttttttaatgaatccttcgttgccgagttttttctgaacgcgttcgacttcttttgtcagcttgtcgaattctttttgcagacgggcgatttcctcatcaatgttaatcagcccttcaagcggcagaatgacttccgctccggtaacgactgctgtcatcgctttgtctgccgcagtgatatccgtcccgattttcagcgtgctcggattcgtgaaacgctcaacgtaagaacggttcttctcaaggcggccggcaatgtcttccgtagatgttttaatgtaaagctcaacctgcttgctcatcggggtgttgacttcgctccggatattgcggacagaacggattaattcaacaagcagtttcatatcagcagccgcctcttgatccgtatgttccggcaccggaaccggccaagagctgatcgtgattgactcgccttcatgaggaaggtgctgccaaatttcctccgttaagaacggcataaacgggtgaagaaggcgcatcgtttggtcaagcacgtacgccaggacagagcgggttgttttcttcgccgcttcatcttcaccgtacagcggaagcttcgccatttcaatataccagtcgcacacatcgtcccagataaagttatacaggtggcgtccgacttctccgaattcataacggtccgcaagctgggttacatcttcaatcgtttcattcagtcttgtgagaatccacttatcagcaactgatttctcaccggacagatcaagctcgtcatacgtcatgccgtccatgttcattaaggcaaaacgggaggcgttccaaattttatttgcgaaattccatgtagattccactttttcatagctgaaacggagatcctgccccggtgaacttccggttgccaggaaatagcggagggaatccgctccgtacttgtcgatgacatccatcggatcaacaccgttcccaagggatttactcatttttctgccctgctcgtcacggattaagccgtgaatcagcacgtctttgaacgggcgctcaccggtaaactcaagaccttggaaaatcatccgggatacccagaagaagatgatgtcataccctgtcacaagaacatcggttgagtaataccgcttaaagtcttcagcgttttcatcaggccagcccattgtagaaaacggccaaagcgcggagctgaaccatgtatcaagcacgtctgaatcctgttcccaattttcgctgtcttcaggcgcctcaaggccgacatacacttctttggtttctttatgataccaagccgggatgcggtggccccaccacagctgacgggaaatacaccaatcacggatgttttccatccagtggagatacgttttctcgaaacggtcaggaacaaagtgaactttctcttcttttgactgaaggtcaaccgccgcatctgccagcggctgcattttgacaaaccattgtgtggacaggtacggctcaacaacggcgccgcttctctcactgtggccgacagaatgcatatggtcttcgattttaaagagaacgcctgtctcctggagatctttgacgagttttttgcggcattcaaaccggtccatgccgttatattcgagcgctttttcattcattgttccgtcttcattcatgacaagaatccgctctaaattgtgtcggtttccgagttcaaaatcattcgggtcatgggctggcgtgattttaacggctccagatccgaattccatatcaacataatcatcgccgacgatcggaatttcgcggtttgtaatcggcagaatcaccgttttaccgatcaagtgcttgtagcgctcatcttcaggatgaaccgcgacagccgtgtcgccaagcatcgtttccggacgggtggtcgcgatttcaattgagcctgaaccgtctgctaacggatagcgcaaatgataaaacgcgccctgtacgtctttgtaaatcacttcaatatcggataaagccgtttttgtggcagggtcccagttgatgatatattcgcctctgtaaatcaagcctttttcgtacaatttgacgaatacttcacgcacggctttgttcagcccttcatcaagagtgaaacgttcgcgcgaataatcgagtccaagtcccattttggcccattggctgcgaatgaaatcagcatactcttccttccacttccatgtttcttcaagaaatttttcgcgtccaaggtcatagcggctcgtgccctgttcgcggagtttcgcttcgacttttgcctgagtggcgatgccggcatggtccatccccggaagccagagcacgtcatagccctgcatgcgtttcatacgcgtaacgatatcttgcagcgtcgtatcccacgcatgaccgaggtgaagcctgcccgtcacgttcggcggcggaatgacgacagaatacggctgtttcgtttgatcgccgcccgcttcgaaatattttcctttcagccaaaaatcatagcggcctttttctatcgcagacggatcatattttgtcggcattgtttgttcgtttgtatccataataaccctccagcatgtttagaaatggctgagcaactaaaaaagagccttcatcctgataaaggacgaaaagctctttcgcggtaccaccttttttcatgaacagatctgttcatgcacttaaacggataacgggtgcggcccgaatttctctactgtatgttcaagaaattatgctcccgggcgaccttccaatgagacggcataagaagcctttcagcacagtagcttctctctcttcatgcgtctttcttgtactcttcccgttcaaagcaggtgtattctatcagctcatgatcttatttattatgttctttattatagtaaaagtgtttttgattcgtcaatcatcttttccaaaaaccgctgccgtcatacataaatgggcatgcaccccgcccttttccgcacatacgatacaaagaaaggcgaatgtgaggaggaattgccgtgaaaaaaagattcaattcttattcgctcccccagtgggccagacaggtccgccttgtatccgcgcaagtcattataccgattacgatctttcagggaatcaggacgattttctttccgacgacttttgatgtccttctgcttgccatcctgctgtttttagcgtgcgccctgcatttggaatggatataaaaaaacgagtcccgttatgaagaggactcgttttccgcctttatttttttctcctgctcaatctgatacaccttcatgagaaatggttcaacatttttcatctgccaaaacgcccttaataattgcgagcactcttctttttcagagcccctttgagcggtctgataccgtttcagcactttgtacatgccggacggataagccatatagctgagaaacaggctgatttccgcttcacggagcggaaatgatttatgatacgtataaaaccagtcaagacactccggacacgctttcggatagcttctgaacaatctggaataaaagccgagcagatcattttgcggagggcccagcgcagctttctcgaaattggtgaaaaagcccgctcccacgtcattatatagaaaatggcggctcgataagctgccgtgattgatcaccgctctcgtcttatcaagatcctttgccgcttcgaaccactcctccagacgctccagagcaaaattgacggcggacaccgtttctgtaagatacgtaacggcctgcagttcaaaaggagaaaggtaccactctttttccgcccggtcggcaaattgttcatagacgagcttatcattttcccaatctcttttcgttacttcataaaagccgctgatatcttcagtactgatttggatgtcccgcacggtcgcggagtggagcttcgcaacctctttaaaaaggtaaacatgcttttgatccagttcttcttcctgatcgtactgaagccaaggcattaaataataagaatcctccgtctggcttccggcaaaaaaatcgcctgcatgcgtgcggtagatcggaacaaatgaacggtagcctttctcctcaatctcaatcatatgatccgtaaaatcattgctgcgggccggcttgagctgtttcaaagcaaaaatgccgtggtttgagtagactttccatacatgcgggctgacaggctcaatatactcagccgccagcccgtattcctgaagcactgattggactgcttccattccattcaccacatttttacggcctctttgtgcttacgcatggctgttattatattcaggtatatacagaagctgaccttcttcaagctcgtcatcaaacgataaagaattcgttctgataagctgctgggatgtgatgtcatatcgttcgcacacccgatcgattgtatcttgctgctgtacaatgcaaattttcattctcgaaaacttttcttcttctcttgtaaataattttgtcaaataatgagagttgtcattttccttctgatccgttttcggtgccggttcttcattctctctttcggacttaagcggctcaggccgttcagatgccgccggttcttcaggcggcagtttggaaaactgaaaagacaaatcaagaggttccccggtttcctcctccggctgcgccatcttccttacctcaatttcaaacccttcatcagcctgggtttcttcctcaagaaacttaggagcgctgtaaaattcctcttcccgcggttccggaacgaactcgcgataagcgggctcctgttcttcttcaaaaaccgcaggctcctcttcgtcttctgtctcctcttgatcactctgacggagaagcggttcggcctctggctgctcttctatttcaagggcgggctgttcctcaacctctgttttttctgcatgcggggtcagagtaaaagcaggggaaaccggttcaacatcatcctttggctcttccagcacttccgctgcatcatcctcagatacaggctcattcctttcagccgacatgattgcaggctcctcagcttcttccggctcttcttcgtcttggacggcagcgggaggaggaggctcagtaattgaaacaggttccggcacctcttccagcctcagaacaggggcggtttcctcatcctcctctttttcttcttcctcttcctgcctgagtataggcggagtctcttcctcattctccacggtttcttgtattgcttcttcttccgatacactcagcggctcttcaggaatctgacgtatcattaattctggttcattttcttcctcggaacgatgttcagcaagattgatcatttcttctctggaaaattcaggcgccacatacagagggatttccggctcttttggctcggtttcctcaagcagtccttcaattgccaaatcagcctgaatggttaagattcttgaatccgtcaactgataatcaaaggcatcaataaaaacgaaaacatcattgaggtggctcactttatttttcggaatcgtgatgtctaccgggaaacaatgaaggagctctgcagtgccatcctcccttgccctcacttcctctacatgtctcagctctctatcaagctcttcgaaatgactgctgtgatctatgttgtactcgccagtaagttctaatgatcctttaattgagacataatcatttacttcctgcaccctgatatcagggtctaatgaaatcgaaagtaattcagaaacttcctgtcctttttggaaacagattgattcttcaacagaaaattgcaaccggtgattatgcggcaagttcatatcctcctttcatctaatccatacaattagatgtcactaaaggtgtatgccgcaatccggataaatatgataaaggaggcattgaaaaaagccgatacaagacttgcttgcatcggcttttcggtatcagcggctgatagtctggaacactttctcagcggcttgaatggttttttcaatatcctccattgtatgcgcagtggagagaaacaatccttcaaattgagacggcggaagaaatacgcctgcgtcagccatccctttataatatttggcgaacagctttaaatcagatgatttagctgtttcatagttaatgacaggctcatttgtgaaaaagaatccgatcattgagcccgcacggttaaacgtgtgcggaatgccatgtgcttcagcggctttggaaatgccttcttcaagcatatcgccttttttcacaaattcttggtaagattcaggtgtgagctgctgtaacgtctcaagtcccgctgtcatggcaagcggatttcccgacaatgttcccgcctgatagatcggaccgctcggagcgattcgttccatgatttcggctttgccgccatacgcaccgacaggaagaccgccgccgatgactttgccgagacacgttaagtcaggcgtcacgccgaaatatccttgcgcacagttatagtccacgcgaaaaccggtcatgacttcatcaaaaattaacagcgcgccattttgttccgtgatgtcacgaagcccttgcaaaaagccttcctgcggcggaacaacgcccatattgccggctaccggctcaacaatgaccccggcgatatcttcaccgtactcacggaatgcgagtgcaacgctttccaagtcgttatacggaacggtaatcgtattcatcgcgattccttcaggcacacccgggctgtcaggaaggccgagtgtcgccaccccggatcccgctttgatcagcagcgaatcaccgtggccgtgataacatccttcgaatttcaaaattttattgcggccggtatatcctcttgccagacgaagagcgctcattgtcgcctctgttccggagctgaccatccgtacgatttcaacagacggcacacggtcaatgaccaatttggccagttcgttttccacttcagtagaagctccgaaacttgttccgttttccgcgacctttttcaggctttcaacgacgcggtcgttggtgtggcccaaaatgagcggaccccagctcagcacatagtcgatatattcattgccgtcaatatcaaaaattttcgatcctttgccgcgctgcataaaaatcgggtccatatcaactgatttaaatgcgcgcaccgggctgttcactccgcccggcatcagtttctgtgcttctttaaaagcggattttgatttttcatagtttctcatctgcctcagctcccgtcaaatgaaattcttattcagcaagccattttgctgcgtcttttgcatgatacgtcataatgaggtcggcacctgcacgtttcatgctcgttaaaatttcaagcaccatttctttttctttaatccagccgttttgggctgcagctttcaccatagaatactccccgcttacattataagcgaccagcggcaggtgatggcggtttttcacatcacgcataatatctaagtatgacatagacggtttgacgattaaaaagtcagcgccttctgcagcgtctgattcagcctcacggagcgcttccaagcggttggccggatccatctgatatgtttttcggtcgccgaactgcggtgtgctgtcagccgcgtcgcggaacggaccgtaaaattcacttgaatatttcacggcataggacatgatcggaatatttgtgaatccttctttgtcaagcgcttctctgatcactgtgacaaaaccgtccatcatgtttgaaggagcgatgatatcagcgccggctttagcctggctgacggctgtctgcgccagcagttcaagcgactcgtcattcaggattactccgtctttcacaacgccgcaatggccgtgatccgtatattcacagaggcatgtatcagcgattacgatcatttcaggataatgctttttaatttcagcaatccctttttgcacaatgccgtgatcgtgaaaagcctgagttccgcagtcgtctttttcttccggcacgccgaaaacgatgaccgacttaatgccgagtgatatgagctcagccatttcatcctttaataaatcgagtgacacatgataaacccccggcatggaaggaacttctttttttccttcaagcccttcaacgacaaataaagggtaaataaaatctgaagggtgaaggcgtgtttctcttactaaatctctcatcgcagcgttcgcgcgcaaacggcggtgtctgttaaatgtttgattcatcattatctatcctttcccgacatgctgcacatgacgtccagcatgccttcaatcgtataggtgtcaggcacatgggatgagatcccgtattccaatagcgctttttccgtcaaagggccgatgctgatatagctcgcaccgctgttttccaaagtttttttttcgtctccgaccgcatgcataaacgtatgcaccgccgaagaactggtaaacgtaataaaatcaaaatgagagcgggatgcagcctgtctcagctcgtccattcctttttcatcctgaatggtattgtacagcacccattcccttatttgatagccaagcggctcaagctccgcttttatgacatcgcgtgataaattgccctttatcactgaaatgggttcggcagctgatgcgtgccgctttaatgtatcagccagacattcagccacatactcatcaggcatcgcatccgtcccggctccccgctctttaagggcgcgcgcagtcttttcaccgacggctgcgatttttttccgtcccgaaagcgcaaggccgtgctcatcgaggtaggaaaaaaagaaccggacaccgtttacgcttgtaaaaacaagccaccccggctcagaaaggtcttcccggagactgtccgcacattcacccgggagcgcttcctgaaaagcgatcagcgaagcggaaacagccgttccgccgagcgcctccactttttttcggaacggggcggcctgtcttttgttccgggtgacaagcacggtctttccttgtaaaggaaggtcatttgccatcctgatcgagctcctgttttacgctgtcgattaatgctttggctcctttttcagacatcatcgccgcacagcgtttcccgatttcttccggatcatgtcccgccgctgtttctttataaatcgtcttaccgtccggagacgcaacaagaccgaccaattcaacctcatcccggtcattgacggacgcatacccggcaatcggcacttggcagccgccttccatcgcgtgcaagaaagcccgttcggctgccaccgtgcgtttcgtatactcatcggtgaattgcgcaaacagcttcaaaagctcctcatccgactctctgcattcaatggcaagagcgccttggcctaccgcaggcagacagcggtccggttcgaggaattcagatacgacatcatctttccagcccattcttgaaagacccgcagcagctaaaataatagcatcataatcttccgtctcaagcttttgaagtctcgtatctatgttgcctctgatccatttaatagtaagatcagggcgctcagcaagaatctgggcgcttcttcttaaactgctcgtgccgatgatgccgccttcttttatgtcgtccagcttttgatgccccttggaaatcagcgcatcacgcgggtcctcacgtttcggtatgcagccgatgaccagaccttcaggcaaaacagcaggcatgtctttcatgctgtggaccgccatatcaatctcctgatgtaacagcgcctgttcaatctctttgacaaacagacctttgccgcccacttttgacagtgtgacatcaaggatgcggtcgccttttgtgacaatctcctgaatttcaaagttatacgaaggattcaattcctttagtttgttaatcacccattttgtctgggtcatagccagtttgctccgtctggaacctaccttaatcgttctcattttctttcctcccgaatctgtttggcgcgtgacgttaactgaaccaatggaattgcgataggcttccgagcaggaagtaattaatcatcagcacgagaaaacatgctgaattccataacgccgccacttttccctgcagttccttaatcattctgatatataaatagtagctgtataaaagcagcacaataaacgagccgagcacttttgaatcaaaccagtacagcgtttccagagacacatacgcccagattacgcctaagatcaaacttaacagcagcatcggaactccgatgacattcaaaacgtaagccatataatcaagttttgacaaatcttcaattctcaacagccattttccccattttttcttctttaataaagaatattgaaattgataaagaagcgaaaagacaaaagaaagggaaaaggcgccgtatgagagaatcgccattgtgatatgaatgaccaaaagctctgagaccagctggccggaaaaagctgccgaatgctgatcagtcggtgaaaacgtgtggatcgcgatcatcgagaaaccgatgacattcgtgaaaaacacgataaaatcaacccgcagaatctgcgtgacaacaagtgagagcgtaacaagcacccacgcataaaagtaaagggcctctgtaatatttaagaccggaaatctccccgtctgccacataaaataagaaagatagacggtttgcagagtccagacaatagaaagcaaccagaaggccattttcccagccttccggttgtgttgaagaaaatctataaagtaaaaaaggacgcttactgcataaataacaattgtcgcttcattaagtcttgccattgctgtatcaatcatacagcgctcactcacttacaagcggacgtaagcccgtttttgcttctgccttttgaaacgaatgaaccgtctggcggttatccaggcttttgtccagctggcggccggcttcatcctcaatatcgaaaatctgcataaacagcttcagcttttcctcggaatccgcttcagccgcaagctctttcgctttcagaatcgggtcgcgcagcatctggttaatgatgcttttcgtatgtttgctgagcagttttttctctcttaccgtcagattaggcagcttgcgctcaatgctctgcatcgtatcggactggatggacagcgccttttcacgcagcgccgaaatgaccggcacgacgccgagcgtattaagccactgcttaaattcaacaattgccgcttcaatgaacagctcgactttttcagcggtttcacggcgttcttttaagttggcttcaacgattccttcaaggtcatcaatatcgtacaggaaaacaccttcaagatcgttcagcgcaggatcaaggtctctcggcacagcgatgtccaccataaataacgggcggcccttccgctgtctgcccgctctctccatcatatctttagacacgacaaaatcactcgcgcctgtcgagctgattaaaatatcagcttcagcaagtgcatgttcaagctggtttaagctgcgagcttctccggagaaacggtcagcaagctcttttgccttcaaaaacgttctgttgatgaccgttactttgccgatgccctgtccgtgcaggttttctgcggcgagctcgcccattttccccgcaccgagaatcaaaatgtgcttatttgacagagagccgaagatttttttcgcgagttcaacggccgcgtaactgacggaaacggcattggcgccgatatcggtttcagcatgcgtgcgtttgccgacagtcaccgcctgtttaaagagctcattgaaaatggtgccgattgtcttttctgtctgcgccgttttaaagctcgaacggacctggccgagtatttgtgtttctccgatgaccatggaatccaaaccgcacgccacacggaataaatgctcgatcgccgcatcgctctcataaaatttcagaaacggagacagctcttctttcggcagcgagaaccattcggataaaaatgtctttatataataacggccggtatgaagctggtcgaccaccgcatatatttcagttcggttgcaggttgacacgataatgttttcaagaacacttttttcttcttttaaacggagcatcgcttctgcaagctcatccggctgaaaacttattttttcacgtatttcaatgggggcggatttataatctactcccactacaagaatatgcatagccgttcatgcacccccgtacatcgcaatttatttataatcattctaacatagaatttattatttataataattataacatagtttcttcgtgaaaatgtgaacagatttcaaaaatgttatgctatagtataaaaagcttcgtttcctctgtaatcatcatactaaaaatcctttactgcgggtaggtgacaggatgaaaaaaacatcaattttattaccaggacttctgcttgccgcttcattattcgcatggcttcagagcggacaggtccgcctctttgcgaatcagggagaatggccggtgctccttatgcttttgggtgccgtgttcttgtatcagggcaaaaaggaagcggctgggcctcacgtccttatcggtatgcttctgttcggaataggtttacactttttcgccaaaccagagctctcttggtggccgggagatttcgaaatgctgctcttcgtactcggtttctccttatttgcggccgccagaaaagaatatgtatacgaagcggttgccatgattggtttttccctctttttatacttctttaaacaaattacggcgtggatggaatccgtgaatattccgacggagcatttcaaaacatactggccgtatgttttcgtcggaatcagccttttcttattgtttatcaagcggaacaaaactatacgataaaacccaaaacgcactgcgttttgggtttttcattacctgctgatcatttttttaatggctccccatgcttcatcttttcctttttttgtttcagaggagaataaaatcagctcatcttcagggtccatatcaagcgtctgtttgacaacctttaagtgcttgtcccattttccttttggaatcttatccgcttttgtcgcaatgacgataacgggaatgccgtaatatttcaagaattcatacatgttcacgtcatcagcagacggcgcgtgtctgaggtcgacaatctgcacgcaggctttcagctcttcacgggtcgtcatataggtttcaatcattctcccccatgcttcccgctcgctttttgaaactttcgcaaacccgtacccgggaacgtcgacaaaatgcaattcatcattgatgatgtaaaagtttaaggtctgtgttttccccggttttgatgacgttctggccaggtttttccgattgattaatgaattgataaaagatgactttcctacatttgatcttcccgccagcgcgatttccggaagtcccccatcagggtactgttccggtttaaccgcgctgatcacgatttctgactttgtaactttcatttcttctctcctactaaggcatgttccaaaacgtcatccagatgtgacacgaatataaatttcagtccttctctgacgctttcaggaatatcctctatatctttttcgttatctttaggcgcaataatcgtggtcaggcccgctctgtgggcaccgagcgccttttctttcagtccgccgatcggaagcacgcggccccgcagcgtgatttctcccgtcataccgacttcgcgttttaccggacgatccgttaacgctgaaacgagcgccgtggccatcgtaattcccgcagaagggccgtctttcggcaccgctccttcagggacatgaatatgaatgtcatggttctcatggaatgtcggatcgattccgagctgttccgcttttgagcggacataactgaaagctgcctgggcggattcccgcatgacatctcccagcttcccggtcagaatcagctttccttttcccggtgacaatgacacctcgattgaaagcgtgtctccgccgactgtcgtatacgcaagccccgtgacgaccccgatttgatcttcggtttccgcttgtccgtatctgaatatccgttttccaaggtagtctgccaaatttttctctgtaacggtaatgcgttttctttcctcagaaacgatggcttttgcagcttttcggcaaatggcggcaacctggcgttcaagcgttctcacaccggcttcccttgtataatagcggatgatgtcggtaatcgcctgatcccgaatctgcaggttgctctttgtgagcccgtgctctttgatctgtttcggaagcaggtggtcttttacgatctccagcttttcgttttcagtatagcctgacaggctgataatctccattctgtctctgagagggcccggtattgaagcaaggttattcgcagtcgcgataaaaagcactttcgataaatcgaacgtctcttcaatataatggtcgctgaatgtgctgttttgttccggatccagcacctcaagcatcgccgaagacgggtcgcctctgaaatcagacgacattttatcaatctcatcaaggagaaagaccggattttgtttgccggcttttttcatcccctgtataatacggcccggcatcgctccgacgtatgtacgccgatgcccgcggatttcagattcatcccgcacaccgcccagtgaaattctcacaaaacggcgccccatgctcgtactgattgattttgcaagagatgtttttccgactcccggaggtccggccagacaaagaatcggccctttcagcgttttcgtcagctgtttcacagccaaatactccagaatccgttctttcactttctctaaaccgtgatgctctttgtctaagatttccccggcttttttaatatccagtttatcttctgtttcgtccgaccacggcagagcgataagccagtcaatatagttgcggataacagagctttccgctgagcttgacggcactttttcgtaacggcttaattccttaagcgccgtttctttgacacgctcaggcatgccggcttcttctatcttctccgtgagcgactgaacttcaccggttttcccttctttgtcgccaagctccttctgaatggctttcatctgttcacgcaagtagtattccttttgagtgcgttccatcgaacgcttgacgcgctgtccgatttttttctcaatttccagcacttctttttcattatgaatagaacggatgaccttattcaggcgttctttaatatcagccgtttctaaaatatcctgcttgtcctttaatttcagcgggagatgagaagcgacgatatccgccattctgccgggctcttcaatatcagtcacggctgcatacgtttctgcggagatttttttagaaatttttatgtactggtcaaaatggtccagcagcgtccgcataagcgcttcatcttccacgtctttcgaatcgtcctcatgcatcagctgtatatcgaccgaagtataatcttcgagctcggtgtattcaaggatctgcgcccgctgaattccttctacaagcactctgatcgtaccgttgggaagcttcagcatctgtttaatttttgtataagtgccgacggtgaaaatgtcctcttcacccggttcgtctatcgaaatatcctgctgagtggctaaaaaaatcatatgatcatgcatcattgcctgttcaagagcctgaaccgacttgtcccggcctacatctaaatgtaaaaccatcgtcgggtataccaataaacctcttaaagggaggagcgggatgctgcgttttgtatcttctgccatgtgactgacacctccgtgactttagtatgaaccattataatacaactttttcatcgttgtacaattccgggatcgggcaatcatcggcttaccgcctgccctgtatataaaacagtctcttcgtagtataccctttctttctgttctgaaaaaggaaaagatgtcctccataaaaaaaccccattataaaaatggggtttatacggattccttattcatttggatatcaaacggtttctgttctgaaggcgggtctaccaatatgacgtcaagcacttcctgaaacgtttttaccgctttaatggtgattccatctattcgtttcagaatggactgctgattttcataagggataatgaccgtttttgctccggcctgctttgcggctttgattttcgggataacgccgccgatgggtttgacaagccctgtcaggctgatctctcccgtcatcgccaccgtatggtcgatagggatgcggtgaatcgcggaaaaaatccccgcagccatcgcgatacccgcagaaggtccgtcaatcggacctccgcccggaaaattgacatgaatgtcatagtctgaaggtttgatgcccattgtgcgaagaaccgtcagaacattctccactgaccccttcgccatacttttgcggcggatcgactttgattggctgccaatgctctcttcctctgcgattcccgtaatattcaggctgcctttgtcctgcgcaggcgtgacattcacttcgatttccagcaatgcgccgctgttcggcccgtaaacggcaagcccgttcacgataccgacttgcggttcatcagcgattttctgctcatttttcggcgtaagctgactggaatgaacaacccactctatatcctctgtcgtaatttctttcctgtcctcggtcaccgccataccggcggcaatctgaatcatattgacggcttcgcgtccgtttctcgtatatgcggtcagcacaccaagagcctcatcagaaatctctttctgaattttgtcggccgcttttttcgcaacggttttaagttcatccttttccagctcgcggaaaaacacttcaagacagcgggaccggatggccggcggaatttcattcggcattctcgttgtcgctccgatcagtcggaaatccgcgggaagcccgttttgaaaaatatcatgaatatgattcggtatctgcgtattttcctcactgtaatacgcactgtctaaaaatactttccgatcttcaagcaccttcagcattttattcatctgaatcgggtgaagctcgccgatttcatcaataaacaatacaccgccgtgcgcatgggtcacagccccctgcttcggctgcggaatgcccgcctgacccattgcccccgctccctgataaatcggatcatgcactgaaccgataagcggatcggcaataccccgttcatcaaatcgtgcggtcgtcgcatcaagctcaacaaaaacggcctgcttctgaaatggtgactgtttatgttttttcgcttcttccaatacgagacgcgccgcagccgttttaccgactcccggaggcccgtaaattatgacatgctgcgggttcggaccgcaaagcgctgcttttaatgctttaatcccatcctcctggccgacaatatcctgaaagcttttcggccgcaccttctctgataaaggttctgataaactgatggcgcgcattttgcgaagctgttccatttccttttttgattctttatctatcgtcactttttgtgtacgctggtttttgagcagattccaaaaatataatccgatgactatcccgaaaaacagctgtacaaataatgcgatccctgtccaactcatgctggtccctcctgaaaaaacgatttatgtatccaattcattcctctgtccgctagtatctcccagcaaagcccggaataaacatttttcagaagggtcgggacaagaaaaaaacctcctgatcaatccgagtcaggaggttttgtaacgttacgctgatgttttatcttgaccgacaacagtgccgtcttttaatacaagacgcggtgcttcaccgtctgccactgtcgctccggtaatgacacatttttcaatgtcatcgcgggacggcagatcaaacatgacgtcaagcatgatgccctcaatgatagaacgcaggccgcgtgcgcctgtttttcgctcgatcgcttttttcgcaatttcagataatgcctcgtcttcaaaatcaagctcgacatcatctagttctaacattttcttgtattgtttgacgagtgcgtttttaggtttagtcagaatttcaaccagtgccgtttcgtcaagctgctcaaggcttgcaatgacaggaagacggccgatgaattcaggaatcagcccgaaacgaagcaagtcttccggaagaactttagaaagcagttcttctttttccaagtctgccactttattatcagagccgaagccgatgactttttgtccgagacggcgtttaatgatttgttcgatgccgtcaaatgcacccccgcaaatgaacagaatgttcgtcgtatcgatctgaatgaattcctgatgaggatgtttgcgccctccttgaggcggcacgcttgcaaccgttccttcaagaattttcagcagcgcctgctgaacgccttcgcctgatacgtcacgtgtgatggacgggttttcagatttacgcgctactttatcgatttcatcgatataaataatgcctttttccgctttttccacatcatagtctgctgcctgaatcagtttgaggagaatgttttctacgtcctcaccgacatatccggcttcagtcagagatgtagcgtccgcgatcgcaaacggcacgttcagaatacgcgcaagtgtctgggcgagaagtgttttcccgcttccagtcggcccgattaatgaaatattacttttagaaagctcgacatcatccactttactgttggagttgatgcgtttgtaatggttgtataccgcaaccgcaagtgatttcttcgcctgatcctgtccgatgacatattcattcagaatctcacggatttcctgcggcttcggaacgtctttaaattcgacttcttcttctgtgcccagctcttcttctacgatttctgtacagagctcgatgcattcgtcgcatatatatacacccggtcctgcaaccagcttacgaacctgatcttgcgtttttccgcagaacgagcattttaattgtcctttttcctcgttgaatttaaacattctttcaccccttaatcttgtctcactttttcttttacctgaagggcaaaagaaaacggttcttgctacgatcgagtatgtattgcattttaccatactttccagtaagacggtaacaatgtgtttcgcgcttgcacattctatatgtatgacaaaaaacagcccggcaatgactatcttgccccaagaaaaagagttatatcataattgtacaaaacaaggcacgaattaatcgcgccctgttttattatgtctattattatgaaccatattaacggttttctacaagaaaatcaattgcttttcgaacttttaaatcttctttcatcgcgtcagttgaaccgattgcctgcttgatgttttcaaccggcatgttgtaagcttcagccattttagtcagctcagcttcaacttcttcgtcagtcacttcaagattttcagcttgagcgatcgcttcaagcgtcaggtttgattttacgcgttttgcagcatcttctgtcatttgctcttttaacgcgttttcatcttgacctgagaattgagtgtaaagctcaaggttcatgccttgcatttgcagacgctgttcgaattctttcagcatgcggtcaagctcagtgtcgatcatcgcttgaggaacatcagcttcagcgttttcagatgctttcagaacaagctcttcacgcaatttagcgtcagcttcgttttcttttgcttcttcaaggcgtttttttgttttctcagttaattcagcaagcgtttcaacttcttcgtcaatgtcttttgcgaattcgtcgttaagctccggaagctctttcgctttgatttcatgaattttcactttgaaaacagctggttttccggcaagctcttcagcatggtactcttcagggaatgttacttcaacatccttttcagcgcctgcttcaagacctgttaactgctcttcgaagcccgggatgaatgaacctgatcctacttcaagtgagtagttctcagcttttccgccttcaaatgcttctccgtcaacgaaaccttcgaagtcaagaacgactgtatcgccgttttcaacagcgccttcttctttcacgacaagctcagcctgacgctcctgaagcgctttaagttcgttttgtacgtcttcgtcagtaacggacacgtcatctttttcgatacctaagcctttgtagtcaccgagtttcacttccggttttacagtcacttttgcagtgaaaattaagctttcgcctttttcgattttttcaacatcgatttcagggcggtctacaggctcaatgccggcttcttcaaccgctttagggtattctacaggaagtaaaatatctaaagcatcctggtaaagagcttcaacgccgaaacgctgttcgaataaaccgcggggaactttccctttgcggaatccaggaatagaaacctgttttactacttttttaaatgcatcatcaagagctgttttaaacgtttccgcatcaacttcaaccgttaatacgccttcgttgccttcttgtttttcccattttacagacatgtgtttccctccaaaaatctattcaggttgtgtcggtcttccattctaaagcaatccgcggctttgtcaaagaaaaaaccgctttgaatcagaatcattatgtaatgaactggcagcctgtccaaccgtaattctcatttcagttaaaccgctatacataaatacaaccactatattataacataacgcctagcgctttcaactatatggcgtgatttacaaataagaaatttcttcaatatccttaatcatcgtgcaggcttcttcgagttcacggctgtcaaactcgtacatcatatgaagttcctccggctcaatgtcaatgccgtgcatctcgtaaccgaccttatgaagcgccgcggcccataaatctgcgttcaaaaacttcggcataaaagggtgcaatacggtcagatgccttctccacagctcctcaacggcggcgtataatgtaggattttcattgccgagcgtttcatcaagcacccggagaacacgatgcaaaatcggggccgcatcaggctgaatcgtttcactcgggatcgcggtcattgaatcaccgaattttgtaatatggaccggtttgctgtagtcgtgctccgacataagcgtcaaaatcatcgttttgatcagcggatgcgcgcccggatcttgaagaatcgtttttaaaaggcccgtgtatttcgcaatattgcggtctttgagagaatgaatcagattcatttgttctgcggggctgttcagcactttttccgcatcaagaacgtcttcatattcctcctcccacgcctcatcctgctgatcgggatcggtcattttgcggctgaattcgagcagccggtagaattgttccgcactttctgctggcagctggttttcctccagtacagcttcaattgtgcttttgacttcttcatattgtttcagctgaattaaaatggtcatatacacctgcagcacggtaaaataatggccgtacccttcattcagcattttctcgcaaacttgttttgcttcttccaattccccgagttccagaaaacaaatcgccatgcctaaatgtacgtcggactcggtatcaccgtggcttaccgcttctgaaaacagttcgagggcctcctgatactgtttatccttcatggcggccatccctttatcaaccaagcgttctttcagacgggggaaaggaatgatatcagcttttttcttgtcatgcgtcatactttatttcctttcaggcgcttattttgttcaagtgtatcaacacgcgtcaggaaacacaagaaaggatgacgcgcacggccaaaaaagccgccggacagatgccggacggcttttttcaggctcgaagccaagaacttcttttcgattcaaactgctgaatgtcgtcctccagcagaagcgttaatgaaatttcatcatagccgttaatcagcatttccttccagtgaggatcgacttcaaacgaaatctctcttccttcgctgtcgtgaatgagctggttttccaagtcaaccgtcatattaagggactgattttcatattgacaggcgagttttttccactgatcatacggcatacggatgggaagcataccgtttttaaagcagttttgatgaaaaatatcggcaaatgacggggcgatgatgattttgaatccgtaatcatccagcgcccaaggagcgtgctcacgggatgatccgcagccgaaattctctccggcaattaatatagacgcgccttcatagacttggcggtttaattcaaactcaggatcaggctcaccgttctcaaggtatctccaatcaaaaaacgcgaatctgccgtatccggttctttcaattcttttcagaaactgcttcggaataatctggtccgtgtcgacgttgatccggtttaagacggccgcttttcctgtatgcgtttttaaaggttccatctttcgcgcactccttacacaactgttttttcttgataaaactttcttacatcgacgaaatgcccgtgaatggccgccattgccgccatggcaggactgacaaggtgtgttctcgcgccttttccctgtctgccttcgaagttgcggttggatgtggaggcgcatcgttccccttcaggcacgacatcattgttcatactgaggcacatgctgcagcctgattctctccattcaaagcccgcttcaagaaacacacggtgcagcccttctttctcagcctgctgtttcacgctttgagagcccggcaccacaatcgctctgacgctgtcggcgacttttcggcctttaatcatatcagcagcctggcgaaggtcggtcatccgcgaatttgtacaggagccgataaatacatgttcgacttttatatcttcaattttttgattcggttcaatccccatgtattcgtacgcgcggatggcttcttttttaccgtcgtcagaatcaatgctttccggcgccggtatttgagcatctaccggaagaaccatgccggggttgatgccccatgtgaccattggagaaatctcgctgccgtctaacacgatggaacgatcgtagacggcgcccggatcggtttttaacgctttccattctgcagccgctttttcaaactcttcgccttttggcgcgtatttacggtttctgcagtattcgatcgtcgtttcatcaggagcgatcagtcccgcgcgcgctcccgcttctattgacatattgcagacggtcatgcgttcgtccatagacatgtttctgaatacttccccggtgtattcaatgacatatcccgtaccgaatttcaccccgtattttccgataaccgataagatgacatccttcgcggtcactcctttttggagcgttccgtcaacgcggatttcaagcgttttcggccgctgctgccataatgtctgtgtggaaagaacatgttccacctcacttgtgccgataccgaaggcaagcgccccgaatgcgccgtgagtcgatgtatggctgtctccgcaaacgatcgttttccccggaagtgtcagaccaagctcaggcccgaccacgtgaacgattccctgatccgcgctgtgaagatccgcaagacggacgccgaactcctcacaatttcgttcaagcgcggttacttggcgctttgcgacttcatcttttatgtcaaaacggttgacagtcgggatattgtggtccatcgtcgcgaatgtgttctgcggccgtctgacctttcttcccttttgccttaatccttcaaacgcctgaggagacgtcacctcatgaattaagtgcagatcaatatagagaagatcgggttttccttcaccgctttttacaacatgccgatcccaaatcttttcgatgattgttcgaggcatcatctttgtttcctccctctacctatgaactaagaccgctctcttttaagcgtcacactatagattttgtattcgcgccgactaatgcggcttttactttttcagtaatatcatgcgttccggcatattggccgccccgggcgatatcacgtgtgcggctgccgtctgcaagcacctttgcgaccgctttttctatggcttgcgcttctgtttcaagtccgaaagatgttctcaagagcatcgccgctgataaaatcgccgcaaacggattggccatccctttacctgcaatgtcaggcgccgatccatgcacgggttcaaacaagtgaagacctgaacttgataaactggctgacggcagcatgccgagcgagcctgtcagcatagaggcttcatcgcttaaaatatcgccgaacatattttcagttacgatgacgtcaaattgattcggagcgtaaatgagctgcatcgcggcattatcgacaagcatatgctcaagcgtcacatcaggaaattcttttgcgatttcatctgctgtttcacgccacagcctgcttgaagaaagcacattcgccttatcaactgacgtcactttccctttcctgccggcagccatcttaaaggcttctctgacaacgcgttcgatttcttctttcttataaaaaagggtatcgaccgcttctttttctcccgcttcattgacatactgtctgcttggctctccgaagtagaggccgcccgtcagttcccggacgatcacaaagtcgaccccgctgatatattcttttttcaacggagatgcctcagacaggctttcaaatacggtcacgggacgcagattggcaaacaggccgagtttttttctgatgccgagcaagcctttttccggcctgagctcaggagaattttggtcccatttcggtccgccgactgcaccgagcaaaatggcgtcggatctttcacaaagagcaacagtctcctcagggaggggattttgatgagcgtcaatggctgctcccccgatcagcccgttttcaaattcaaattcatgtccgaattgttcggcaacgcttttcagtacatctgccgctgattccgccacttccggcccgattccgtcaccgggaagcaaagcaatgcgttttttcaaatcaaacgttctcctttctattacgagccgaccgcagtctgtctctttaatccgtctatattgcaatccagcaccaattgccggttcactgcattcagataagcttttgcagaagcttccagaacatcatgcgcgattccccgccctgatgattcttttccgttcacggtgactctgacataaacttgagccagcgcgtcttcgcctttccggttggactggatgcggtaatccaacagttcaatatttttatcgatgcagcgcccgagcgtgttataaacggcttctacgctgcccgctcctgttgccgcctcttgaattagctgttcgttttcctgatttcgcaaagagactgttgcagtcggcacctgagacgtcccgtaatgcacttgcagagacaaaaattcatagccgatttttttgtccgtcactttttcttctaaaataagagaaatcaggtcatcatcggtgatttctttcttcttttcagtcagttctttaaacatcgtaaaaaatttattgatttcatcactgtcaaactggaatccaagcgcattcaggcggtctttgaacgcgtggcgtccggaatgctttccgagcacgagcgcctcagcagtcacacctacaagttccggtgaaatgatttcatatgttgatttctctttcaggaaaccgtcttggtgaatacctgactcatgtgcgaaagcattatctccgacgatcgctttattgcggggaacggccattcccgtcagtttgctgacaagatcactcgtccgctttaactcatgaagggtgagagatgaatcagcctgatacgcgtcatttctgacatgaagcgcaacggcgatttcctcaagcgcggcgttaccggctctttctcctattccgttaatggcgcattcaatttgatcagccccgttttcaattgccgaaagtgagttggcaaccgccattccgaggtcatcgtggcaatgggctgagagttttgcccggctgatattcggaacgtgttccttcatatatttaaagatatttccgtattcagcaggcgtcaggtaacctacagtgtccgggaggttgatgacgctcgcgccggcatcaatcactttttctacgatttcagacagaaacggaagttcagttcggcatgcatcttccgctgaccattgaacgagcggaaagcgttcttttgcatacttcaccatttcaaccgctttttccttaacctcttcccgcgtcattttcagcttatgcttcagatgaatgtcagaggtggcgataaagacgtgaatccgcgggctgactccgtctttcagcgcttcccaggctgcatcgatgtcacctttgacagagcgggcaagccctgttaccgaacaatttttaatcgttcttgcgatttcctgcacggctaaaaaatcacctcgggatgaagcgggaaatcccgcttcaataatgtccaccccgagtctctcaagctgcttggctatcgccagtttctcccgtgcattaaggttgactccgggagattgttcaccgtcacgaagagtcgtgtcgaagacattaattttgcgcaacggagaccaccgcttccttctttttgccttgtttgacaaacggcatcatttcacgaagctgtctgccgactttttcaatctgatgctcgttttcacttgcattgatcgcattgaaacgaggacggttcacttggttttccacgatccattcttttgcgaatgtaccgttttgaatatcagttaatacttgtttcatagattcttttaccttcgcgtcgactacgcgcggtcctgatacaaaatctccccattgagccgtatcggagattgagtatctcatgcctgccaatccttcttcatacattaagtctacgatcagcttcagttcatgcagacactcaaaatatgcaagttcaggctggtatccggcttctgtcagcgtttcaaaacctgctttgacaagcgccgttaaacctccgcagagaacagcctgctcaccgaacagatccgtttccgtttcttctttaaatgttgtttcaagaacccccgcacgcgctccgccgattccttttgcataagcaagcgccgtgtctttcgcttcgcctgatacgtcctggtagatggcaaacaatgccggtacgcctgcgccttgttcatatgttcttctgacaaggtgtcccggcccttttggagcgacaaggaatacatcaacatcagcaggaggcacgatctgatggaaatggacgttaaatccgtgtgcgaataccaatgatttgcccgctgtcaattcatctttgatttcagcttcatatactttttgctgctgttcatccggaagcagaaccataatgatatcagcctgggcagccgcttctcttacagaaaatacttgatgaccgtcttcttgggcctgtgtaaatgatttgccttgtctgacgccgacaataacatcaattccgctttcttttaagttcagcgcatgtgcatgaccttgtgaaccgtaaccgataatcgctacttttttacctgccaatacgttctctttgatatcaccgttataatatacttttaccattttaatctctcccttttttgtgttatacaattgaaattgttttattggatgacgccttctgctgggttcccctcgcaaaagccgttgtgcctgttctcgcgatttctttaatgccataaggtttgagaagctctataagcgcttcgattttattggattcgccggtgacctgaacgacgatgctgtctcttgagacatcaacgatggaagccctgaacggttcaataattccgttcatttccgttctggccgacggtgcggaaacaactttaattaatgcaagctcacgctgtacgatcgattggtttgtgatatccgtcactttcaggacgtcaatttgtttgttcagctgctttgtcagctgctctacgtcattttcgccttccacatggacgacaaatgtaatccttgaaacaccgctagtttccgtgtggcctacagtaatgctttcgatattgtagtgtctttttgtaaacagtccggtgatccggtttaatactcccgagcggttgaccaccgttaatgtgataatgcgtttcaaggtttcacccccaccatttcatgaagtcctttaccgggcgcaatcatcgggaatactttttcgcttttggcgacccggacgtcaataacgaccggctcttttgatgaaagcgccttttgcagctcttcttccgcctcttcttccgatgaaatccggacgcctgtaatgccgtaggcttctgacaatttgacaaagtcaggctgcgccgagaatttggattcagaatagcgttcttcatagaagatttcctgccactgtctgaccatgcccagacattcgttgttcaggataatcactttaaccggaagattcagctgccggatgacatctaattcctgcagagtcatctggaaacctccgtctccgaggattgcaacgaccgtggcattacgatcagccagctgcgctccgatagctgccggaaggccgaagcccattgtgccgagacctccagaggtcacccacttatccgcctttcggaaaggataaaactgagccgcccacatctgatgctggccgacatccgtcgccacaatcgcctcaccgtttgtgaattggtgaatatactcaatcagcttttggggtttaaagccctcttctctgttgtctgtataccaaagcggatattcttctttccattctgaaagttgctgtttccattcctccgagtgtccctgttttccgttttgcttcaataattcctgaaggacgattttactgtcgccgaccaccggaatctgcgtttcaataatttttccgatttcggcagggtcaatatcgatatgcgccaccttggcggactttgcaaaatgcttcaggttccccgtcacgcgatcatcgaaccgcgctccgatgctgatcagcaagtcacagtggtaaagcgccatattcgctgtgtatgtgccgtgcatccccgccatccccagaaaaagcggatggtctgccgggaaaccgcccagaccgagaagcgtgtgcgctacgggaatttgctgctgttcagcataattttttaaatcttctgaagctttaccgtgcaaaacacccgctccggctaaaataaccggcttttgcgcactgctgacagcttccacgagctttcggatctgcagatagttaggctcttttaccggctgataccccggaaggctgatctcgtgatcatacctgaattccccttcaaatgatgcgacatccttcggtatatcaattaataccgggcccggtcttcctgttgtggcgatatggaacgcctctttaatcacacggggaagatcttccggacggcgaacctgataactgtgtttcgtaatcggcatcgtaattcctaaaatgtcagcttcctgaaaagcgtcgctgccgatgaccgaagtggccacctgaccggtaaacaccacgagcggcagtgaatcaatcatcgcatccgcaagaccggtaactaagtttgtcgctcccggtccggaagtagcgattacaacccccggcttcccggaaactctcgcatacccttccgccgcatgaatcgcaccttgctcatggcggggcaggatgtgaaccaatcctgattgatacaacttatcgtaaatcggaagaacggctccccccggatagccgaagatcatttcgacattttctttctttaatgattcaatcagcattaaagccccgttcattgtctttgtacaatcggcagacagagtatccgcctgtacatttgtgcccattttcagttcctccttttcaatgttcccttctaaaatccaattcataaaacgaagcgccggctgacgcaaataaaaaagccttcccacccacattcagccaagcattttatgcgatagccaaaaggggcgaaaaggcttgctttccgcggtaccacccttgtttacggtcatatgagaccgtctcatggataattactatccgttttgataacgagtaaacattgacgttcactcggccgagtcctactcttcacatttcagaccggcactctgaggcgagttcactttggtttgtttttgccggctctcagcgttaccggctctctgtgaaaaacttcagcaaagctacttatcctcttctgcgctttttattatggcggctcttttatttaaaaaagaaccttcatttgtttgttttttcagtgttttatgatttttctttttagtgtgaatcatttaattatttttgtttgaactcatattacgctcgtttacaggcagtgtcaacagcatttttataattattagacaatttagattaatcaatctactttgtatacgctttcattactgatacaaaaggatcggtaaatgttaaaagtttttataatttttttgttaatctcttaagattacatgaaatttttccgttcatatacgaatatgtcacattttattccaagatttttcacggtctttccgtcccgcctgtcagatattcagttcagattgaacaggctctttatacagacatacgcatacactattcttatctcgtgaagaaatgagtgatgtcatgaataagatgttatcaggcatgcagggcctgcctcctggatttccgcctttaccggttttaccgccgcagtcttattatcctccggctccgatgcatacagccccatatcaggccggtccttcttttcagcagggatttccgccatccggttacgggcagcagaccccgcaaagcacgctggcattctccggacagcaattcgtcccgtacccttatacatccgggtactacggccaaaccttcagtgacgtcggaggaagcctcggcaccgggacacatcccggcgcactcggaggcggtttcagcggcggccataccggcttcagcgctccaagcggattcagatgatataaaaaaccggccccgcacggccggttttttcttacttacagggtataacggtcattccattgattcaattcctgctccgtatagtaatcagcccttgaaacctcaacaataattaaaccgcattgagtgattaaaaattgtttcagctcctcaaacagctcatcttttccgcaaaagatggtttctatattgtaattcttatatgcaaatgcgtacttcaaaagctaattcctcccgctgtctttctatcgattattgacaaaatgtatgatagaaattagataatttatcactcaagggcgccttaagtatctttatacatatatttattacggtaaatattacattaagtttcatttatattaaaattactttacaattttcataaaatacggaacttttgtttcgtaaaaaaaataaaatacaaaaaaacctcaaacccattgacagggcttgaggtttttaattatacgtcccaggagagattcgaactcccgaccgacggcttagaaggcccatcttgacccagttcatgatgaactgggttttttatatgaaagatctcacagatataaagagctaatgcctttcaaaggcattagcttttttgtttatattgattttgctttgctgctgtgattttgaagactgtttgattttattgtctcgagcattcttaaactgaacacaatcagcagcatcaggagcatcagtgcagtgaacagccagaacgcggtttgtgcgggatactcatccaagctccagccgacggcgatcggaaggagtgaaccccctaatccgtttgaggcaagcagaatactggtagttgtttctgtctttcctgggtaaaaatgattggtgatgattagggctattgcaaacatgccggccatgaacagtcctaaaaagaagcaaagggcaaaaccgaaccatacgcttttacttagtgctaatacagcaagtgcagccaggccgccaacgcttataatacggagataacggtgatatgtcagcttttcagataccggacctgttaataacctgccgataatcatcccagtccaatacacggtgactgttatcgttgctaaggagttggggatatcccatttctcagcgaagatggaggggataaaatgtacaattgaaacttcactgcctccgtaaaagaagaagtaagcagccgccagggcaataaacagcaatccatgtgaccgatagccggtgctttcttttttagtgccgtcggaagagacatctttgcgtatgagaagctgatcaatgctcccaaaactcatttgcttccatgcgattaaaagtgcaaaactggataaccctaatactaaaaaagcaattgtccacatgtggctgttgataagaaagcctgaaagcagaggcatgaacagcgcccctaatccgtaagccacttccatcttgctcatagccacggcttgtctttctttaatagcagtgaggataatcgtgcctacgcaggattccaccaatccagcaccgagtcctgctatactgacgagaagaaagagcagcggccagggcggcaggaaggtgatgaaaacctcacagttgatgagtgccaggccaaagataacgacgtttttgcgcccgaactttttcaccatgtaaggcattccgatgacacccacgaggaagcccatgaactgagaaaatactagtactccgccattgctgtaggtttgtgaataatgtgtgagtaactcagggagtacggctccaagaataacaagtgtaaaggcaatcgatccataagaaaaacagcttatccacagcagacgagttttcatcattttatctccttattggtaaaataatatttctctctactcgtacgacatgatgtttttacaaaaaatccaagtattgttactatatcacataaccttttcacatacatcccttatggtaacgttaacaaattgttaacattttttacaagaagatcgttgacattattttcaattattaatacgataaaaagcgagtttctaataatttcataggggtggtatttgtgggaacgaaggaaatcacgaatccagacagcttgtattacagtgttgacgatgtagtaatggagcgcggagaagggatttacctgtacgatcaagaaggtaatgagtatattgattgtgcttctgccacgtttaacttgaatttaggatacggtaacaaagaagtcattgatacggttaaagatcaagccgataagctgatccatgtgacatcgtcctttcaaacagacgccgtaaataaactagcagaaaaactagtcgaaatcgcccccgataatctcacaaaagtacaccctaaagtcagcagcggttccggtgcgaatgaaggagctattaaaatggctcagtattactccgggaaaaccgacgtcatctccttatttcgaagccacctcggacaaacctatatgacatccgctttgtccggcaactcattcagaaaagaacctttcccgccgcaaatctcttttggcctacaagtacctgatccctattgcagccgctgtttttataatcagaaacctgattcgtgcggtatgctgtgcgtagaaagaattaatgattttattgagtatgcgagcaatggaaaaattgccgccatgattattgaaccgatatccggaaacggaggaaacgtcgttccgcctaaagagtattttaaacagctgagaaagctatgtgatgaacatgatatcgccctgatctttgatgaaattcagaccgggttcggacggacgggtaaaatgtttgccgcggaccatttcgatgtgaaacccaatatgatgaccgtagcaaaagggctcgggggcacaggctttcaagttgccgccactctgacggaggagaagtataccggacttccgggatatacacattcctttacgtacggatctaatgtgatggccgctgcagccgcgtgtaaaaccatagatatcatgcagcgtccaggatttttggaaaacgtaacgacggtcggaaattatattatggaccgcttagaaacgatgaaagaggattttgcttttatttctgaagtaagaggcgtcggtctgatgatcggtgttgagattgtcaaagagaacaatgaacctgatgtggagctgaccaattatattgccaaacgggcgatggattacggactgattctccggacatcccgttacggattcggaaatgtatttaaaatccgtccgcctttaaccattacacttagtgaagctgaggtgctctgctacagacttcgcaagctattggaggaaatcaagtgagagactatatcattgagcttggacaatatgtttatcaaaaggtgaaaaatcaaaaaggcacgctgaaaaatcggctcgtaaacggatattcccccggaggcgatgctcaatttaatatagacgccgctgctgaggaggcggtgctggattatattcaagaaaagggccatccggttgctttttacacggaggatggcggcctcaagctgattggagagaatccgcaatatattttaattgtagatccgatagacggaacgcgcccggccgccgcgggacttgaaatgtcatgtatttcgattgcgcttgcttcctataagccaaacgcaagaattaaggatatcgaatttgcttttttacttgaattgaaatcaggcgcttatatgtacggtgatatttacagcgataccattcaatttgaagggtatcagggagaattgccgaatttgagcggagtgcaggatattaaaaatatgttttggagccttgagtttaacgggcatccggcgcagctgatgacggacgcatacggccatttgattgaccagtcggccaataacggcggagtctttgttttcaacagcgcttcttattcgatttcacgaattattacggggcagatggatgcttatgtggatatcggcaatcgtctgctgaaagatgatccgaagctgctttcagattttcagcaggtcgggaacggacaggtgctgcacttatttccttatgatattgccgcgagcgtctttttggcgaagaaagcgggagtggtcattacggatgcgtacggccggtctttagacgacacacttctgacagatttaagttaccagaatcagcaatcatgtatcgctgcatcaacgaaggagcttcatcagacattattagaccaaatccgctggggcagaaaggaagagagatatgaaggcgttggtctggactcctaatgataagcttgaatatcaagaggtggacgagcctcaaattcgaaaagccaatgatgtgaaggtgaaaattttcggcaccggtatctgcggcacggacttaaatgtgctgaaaggaaaaatgaatgcaacccatcatatgattatggggcatgaatcggtgggagcggtcgtggaagtcgggccggacgtgacaaatgtaaaagtcggagaccgcgtcgtgatagatcccacgcagttttgcgggaaatgccattattgccggagagggctgacgtgttattgcgaaaccttcgaggaatggcagcttggaatcggggcgcatgggacgtttgcggaatattacgtgggggaagacaggttcatgtacaaaattccggattccatggaatgggaacgggccacattggttgaacctctctcctgtgtgctgaacgttgtggataaggcttcgattcagccggaggattcggttttggttttgggttcagggccgatcggactgcttgtgcaaatgatggtgaaaaaactggcgcgtttgacggtcgcgactgaaataggcagcttccggagtgaggcggcaagccggatatcggattatgtctaccatcctgaagcattaactgtggatgaagtgaaacggattaatcaaggaagaaaatttgatgtgatttttgatgcgatcggcaatcagctcgattgggcttatcctttcattgaaaagggaggcagaattgtgccgatgggctttgatgatacgtatgagatgacggtaaggccgtaccagctgctgtcaaacggcgtgacgattgtgggcacaggtgaagcccggcagatcatggaggctgcgttggcatgtgcgtccgaccttccgcagctctatgatttcattactgaaaagacggaactgaagaattatgaagaagccattgatcatctcatgggcatcgatccggtgacaaaagagagaaaggatatcagcgcgataaaaaccattcttgtgtctgatccggaacttttataaaaaatggcgaaaacggctcaaatgagggccgtttttctttcttatttatccggtcttgcagatttattaaaaatttaatatgatactctttgttaacaattcctttccccaacgacattatactctgagcgcgtcctcttttgctccgtaagccgtccccatattccccagataaaatcaatgcttccaactgatatggtgcggatttttatagtaaaaaggagtcgttatcatttgaaagattatacattacagcagcaatggttcggaaatgtccgtaaagacattctggccggtattctggttgctctcgctctgatccctgaggcaatcggattttcaattattgcaggtgtcgatcctatggtcggcctttacgcatcattttgcatcgcgattattatttcgatcttcggcggcagaccgggaatgatttcagccgctacaggttcgatggcggtagtcatggtgactttggtggccgattacggactgcagtatttgtttgcggcaaccattttgacaggtattattcaatttattctcggggtcagtaagatagcgagattaatgaaatttattccgcgttcggtcatgatcgggtttgtgaatgctttggcgatcttgattttttccgcgcagctgccgcagttcaaaggggcatcctgggtgatgtatgccatgctcgccggatcgctggctatcatatatcttttgccgaaggttacgacagccgtgccgtctccgctggtagcgattattgtcatgacaattattgcggtggttttccatgcggatgtccgcacagtcggtgatatgggcggaattacaagttcacttccgcatttcttgataccggatgttccgtggacgtttgagacattgcggattattttcccgtattcactggcgcttgcattcgtcggattgcttgagtcattactgacggcccagattattgatgaaatgacggatacggatagtgataagaacaaagaaagccgcggacaaggaatcgctaatattgtgaacggatttttcggaggtatggccggatgcgccatgatcggtcagtccgtcattaatacgaaagccggcggacgcggccggttatcagcttttacggctggagcgtttttgatgtttttaattgccgtattaagcggtatcgttgtgaaaattccgatggctgcgctggtggcggtgatggttatggtgtccatcggcacttttgattggtcatcgattaaaggcttgcggaaagcgccccttacggattcaatcgttatggttattaccgtcttgacggtcgtcctgacaaatgatttatcgaagggtgttttcgtgggtgtgttattaagcgcgatctttttcacggctaaaatttctaagctgaagattgtgtcgcattccgaacagaaagatgtcagaacatataaggtaacgggacagatcttttttgcttctgtatctgagctgatgaatgccatcgattatgatgaagatgtgaaacggattgtcattgatttgacaggcacccacgtgtgggatgattcaggagcggcggctcttgagaaaattgtcgccaaatgtaaagaatacggaattgaggctgaattaaagggattaaatcagaaaagccgagatttaatgaagcaaatggcatagaatttgtgaagtccggatgaatatatccgggctttttttcggttaaatttgccggaatgcattgttataatgaatgagacttgaaaaccgtatataggagacttgcatatgatgtggcttcagaagatgaaccaagtgttggggagaatcatgccgcttttgactccgtcaagtgtggcggcgggtgtgctgttatctcagcatatcagctggatggccggcgctgtgccgtggatttttgcatttattacatttacaggcagtctgagtgccaattttcaatcgctgaagcgaagtattgagcagccgctcccgatgatcatggcattgtttgttctgcatattttcatgcctgtttttgcatggggaagcggtcatttgatattcagcggtgaccctttaactgttacggggctgataatgggtgtggtgattccgaccggaattacgagtttgatttgggccgcgatgtataaggggaatgtcggattgacgctgtctataatcctggttgataccgtactgtctccttttatcgtaccgctgagcctttctgtcctggccggggcaaatgtccagatggatgtgtggggaatgatgaaagggcttttggaaatggtggtgcttccgtctatcgcagggatgatggtcaaccagttttccccgccggtcaggactcagacgataagccggacgctgtcccctttttcaaaactctgtctgatgatagtcattgccattaacagttcggaaatcgcgccgtatgttacgcacttggatatcaaatttgcgggcatcgcggccgtggtattttttattgccatgacgggttatgccgtggcttggctgatcggaaggctcttgaagcggagtcaggatgaaattgtctctctgatttatacgggaggcatgcgcaatatcagtgccggggccgttctcgccgtttcgttttttccgtcgcaagtggcggttccggtcgtcatcgggatgctttttcagcaaatccttgccgctttattcggctatttgctgaggcgctttgaacttaagccggtcgttatgaagtatgaaaaaaaccgctcagccacgtgagcggttttttccgtacagccagcttagagctgaaatgaattgtcttttgaacgcttcttgatggtgtacggcgccctcttcaatcgtgaaagagagctgagattgagagaaacctttttgcctcatgctttcatgcacgtctctattttgtctgaccatagtgttttggatgttgtttttatgctcagcttcacttctgccgacagacatatagatgcgctggcgtgtcggctgcaaaggtgcggagcggacatagtctgccgatttttcataccagaaggacccggagatacagccgattctgccgaatatctcaggcttctgtaacatcgcgtacattgaaaacaatccgcctaatgacgcgccgatcagtcctcttgtttccgggtccggagacatgtgatgcatatcctcaaccgttgggatgatggtatttgtcaggtcttcaagaaagaggctccctttgccgccgaaatcatgaaacgcaggactcagggaaggcgcaggccatggtgtgtactcatcgagtctgttatccggtttgatgccggcgaaaatcaattcaggaagtgttctgttcgcaaattggaattcaattttctccatctgctctaaaaacaaaactcccccatcaagtacgtaaacacagggtaaagccttggtttgaaccgaataggagggaggaagatataccgtgcattcctttccatttatccggtgttctgtgagtgtgcctctcatgcgtccaatccctttttttgcttaaacagcagaaaaaagaaataaggaacgccgagaatcgccagaataatgcccgccggcacctctgatggctgaaagaacaatttgcccgcaaagtcggcggatatgacgagaagcatacccaccagtccgctgaccggtaacgaatatctgtgttcaattccggcaagcctgcgggaaatatgaggcgcgatcagtccgacaaatgccatgctgcccgctgcggtcacacatgcgctgatcagagcgatgcaggcaacgagtaaaatggttttttctttattggatgaaacaccgaggcttttcaccgtgtcctcatcgaaacgtatggtatccagcaatgacgttttcgccatcagcagaggaatgaacacgatcagccacggcagtatcgccgtaatggtcatccagtttgccgaccagatgctgccgttcttccagaccatcgccatctcatagtcctgcgggtccatttttaatgaaagaaatagagacagcgcgctgaatccggaattcatggcgattccgacgagaataattctgccggattccaaatggccccggtgccaggcgaaaatataaatcagcacagccgccatcaatcccccgataaggccgaagacaggcatgcccatggcggatgcaagcgccgtcgcttcagactgcccctgaaacagaagcataaacgcgacgattcccgctccggctccggcattgatgcctaaaataccgggatcggccagcccgttcttggtaatggcctgaataacggttccggctatccccaaaccgagtccgatggcagccgccatgacaatgcgcggcagcctcagctgaaacagcaaaatttcatattgaggattcggatggatgtggaaaagcgtgctgagcagttcacccggctttgcggaaaaagaaccgcttgtcatgctgaaatagcttacgagcaatatgagaacaatcagtatgagataaattccggccattttacgcaccgcgctgatcccctccttttcttttaatcaaataaagaaagaaaggaacaccgatgatagaagtaacaacttcaataggtgtctcaaacggataattgatcaatcggctggcaagatcgcaaagagtcaggaagacgccgccgatgatgcacgcgcagggaatcagcctgctgtagtctgatccgacgagaaagcgtgtgatgtgcggaacgaccaaaccgacaaaggcaatttttccggcaagcgccaccgagcttccggtcaatatgacaacggccgccatcgccatgagtttgatggttcttttctgctgtcccaaactttttgaaatgtcgtctcctaatgatacggctgtgacctttttgctgagaatcatggccgtgatgattccgatagcgaaaaacgggacggccagtttcaaaaaatcagggttcatttgatgcagtctcgcactgtaccaaaaactgagatcctgcgagatttgaaaataaatcgaaagcgcggccgacagactgctgagaagcatactggtcaccgttccgataatggcaagctgcaccggggtaaaaccgccggggagaatggaggccagcccgaaaacaagggcggcgccgaaagcggaaccgataaacgagtatatgatcatttcaatggatgtcgattgagggagcaataccatgcaaagggtaatgataaaagcggagccgtccgacacacccatgatcgaaggcgaggccagatagttccgtgtgattccctgcatgagcgctccggaaacagcaagggcggcgccgataaacatcgcgccggcagcccttgggattcttgaatgccatatgatctgatggtcggtattctccggattaaagtgcagcaatgcggagaacacggtatggacgtcaagctgctttgcgccatataaaacggaaagcagcagcgacagaacaatggcaatcggtgaagcgatgataataatgtgtgtccgccgttttgcatacatgtgaaaaacctactctttattagtcttgagtcaatttatcagccgcaacctgtaagaagcggattttactccaagcggttccgccttgagctaatggatcaatcgtattgacgtatacatggtcttttttgactgccgtcaggctcttccagatcggatttttctctaaatctttcaacgcgtccggtttatccgcgttttcatcatcagagaattgtacgaagatatggtcgggattcatttcgcttaatttttcaagagaaatcagttcctgcgctttcgccgctttgacttcggccggcgccttcagacctaaatcaccgtatagcgtggagttgaaataaacttgttcagggtaaatataaatattgccttgtctgattctgataaccagcgcgtttgactgtttcgctttgctgttgatctttgtttttgtcttttttagatcctgttcgtaatcggcaatgatttctttcgcttttttctctttaccggtaagctgggcgagcagcatcatgttttctttccagtttgatgagatatgagagacagggatggtttcagcggtgccgctcaatttttttaatgttttttccgggaatttggttgatgccagaatgacgtccggctgcagctcaagaattttttccatattcggctgcattttttcaccggttgatacggatttatctgtaatatctttaaacagttccgggaatttgccggagaatgaaatcgctcctgccggatggacgtcgagtaatttggcgtcttccattgactctacgctgcctgtaatggcgattttgtcagtcggcgctttgacttcatatgtttttccgagatattcgattttctttttatctgaagaagcgtcctttcctttacttgctgtatcagatgtttctgagcttccgcaagccgcggccgtgaaagccaaaagcaaaatcatgaaagcgaatgccaatttcttcatctattgttcctcctgttcaattgataactattatcaattggaattatagagaatgaacagagataagaccatggacaatttccggtattaccatggacgatcttcggaaaaaatggaaatgctttgctcaatgatccgctgatggccgcttggagaatattcaatccacgggtcggatgaaatgggaaacacgcgtttattgctgacggctctaaggttctgccatatctcggtctgctgaatgtgctgaaaatagcgaagtgtttcgggttctttgcaagtaaacagcatgatgtagtcagcttggcaatccgccagcatgtccaatgaaatcttttcgtcgggagcaaaggattccggttttgcggaggcaaagcctaaatcgccgaagaagacttcctcaatgctgttgttatgggcgatatacatattttctttgtacacacggacaaataagaaacgctgatgccgcaagtgttgaagcgaatccttcgctgattgcgcaaggctttgataggcttcaagccaatgctttgcttcctgttcttcattcaggtaagcggctgtgcgcagaaactgatctctccaattgtcttgagtcggcaggtagaaaacttcggtgatatcattcaggcgctgtttttcttcttcactgacagaatccagactgaaaatgatgtcaggcgcagcttgagacagcgtatgtaagttctctttccaatctgcgttgtagcggtaagcgctcaggtgaacgggaatgtcggaagagaattgtttgtaataataggccgtccatttcgggtgaagcgccgcagcgtaaggcacgtgatgcagcgggatcagatgccccattatttctttcccgtacgcagccatttttgtgcgtctttttttcatatagcttgtaggtgagctgcctgtatgttttttaaaaatgcggctgaaataaaattcgtcctggtagccgatttgatgagcgatttcccgcagtttgcagctggctttagccatcagtttttttgcattggtcatgcggatgtctgtgatatattctgttacgctctgtccgtatagttttttaaaggtttcactgtaatgcttggggctgatccccgccatttgcgcaagctgggtgagcgtgatttttgtgtcgaattgtgcatgtatgaattgttttgtctgttcgatcgccgctttcgtattgttctgatgacacacttttgcggcatataggtcgtacatcagctgctgaaagtcggctgttgatttcattttctccaatgcgtctgctgattgcacattttcggaaagtgactgaagccggcttgtcaaatgttcaaccgtctgcaaattcatttgctggagtccgtgaaagatgtcttccccattaaccgggagcatcgcttcttcgtctgataaataggaaaaaacacgaagtctgacgatatacaaatggatgccgtctgacggtatagggtcaatattgaatgtctcatcacgaggacagatgtagagtgtttccttctgaagcgggaagctgtctgttccgatatcaatttttccctcgcctttcacatgaaagatcagtacgggggaatcagtgagctgatgctctgacagaaggtcggctgttttttttacggagatgatatcaattggctgaaagaataatgtgtttttcatgagaaaccaccttttaggaaacattcatttaaatgataactgttatcatttgaattgtaccaaataaatgaatgttttcctataaaaaggcggaaatgcaaaacacgtcaaaatgttacacgtgtaacacgaatcttgtcagtatatgaggtattgctttcttacgggcttgaattgatcaagccggcgctgatatgtgctgatgatgtcttgaatggaagcgctttgttctatttttttgcgtacccagccgttgccgatcagcttgtcaaaggctcctgtcggcaggaatgagaagtcgttcggatataagtcatgcatggttttcagaatggagagccctgtttttaccgcttcaaatgtgtttctgtttgttacgtagacttgtacgccgtggcatagcttgccctggtgcttggagaagctggggatgaatgaagcggctctgaaggtgacaccgggaagcttgagactgttaaggcgttcttcaagctctgtgctcttcatataaggcgcaccgataagttcaaacggcttcgtcgtgcctcttccttcagatacatttgtgccttcaattaagcctgttgccgaatatgcgaatatgctgtccggggtcgggatgtttggcgaagggaggacaaacggcagatcggtatcttcaatcgtcatcgtccgtttccagcgcttcatctttacgacggtgaggtcggcgccaatatgaaactctttattgaataagagagcaagctcgccgatggtcatgccgtgcttcagcgggattggataaagtccgacaaatgaagcgtaatcaggttcaagaaccgggccgtccggatttcgtccgccttgcggattcggccggtccaagacatagaaaggaatgcctttttctttggccgcttccatggcataggccattgtataaatgtaggtgtagtatcgcgttccgacatcctgaatatcgaaaatcagcacatccgtatctttcagcatgtcaggtgtcggttttctcgtttctccgtaaaggctgtagacgggaagccctgttttttcgtctatataggatgtgactttgtctccggcctgagcgtccccgcgaacaccgtgctccggtccgaataatgccgtcaaatgaatgtcttgtgcctcgtaaagcacgtcaacgctgcttttcaatgttgagttcacaccggtcggattggtgatcagcccgatcctttttcccttcagttcttgtttataatctttcagcaggcggtcgatgcctgtttcgatgcttggtttcctggcagtgtgtgaatttctgtcagaagccgccgagactgccgtcatggcactgatgacgactaatccggcgagaagcgcagccgtttgtgttttcatgatcagccctcctgtttaaagcggttttccggtttttagattaattccgaagccataagggtacagtgtcgttcctgggtgagtgacggaaggaatgtcaacgggcagcctgcctttcggttttgtctgtccgaatattgcttcaatgcctgccggaatgtttggctgaagaaattgtccatctgcatatcctttaaagccgtagactgcgataagggcttcagcttcttcaaaattagcggcgtcgtaaggattacgaaggctcatcagcacaaagggtttatggttcgattgtgcagatttcatgacggcccgcggaaatgccgtcgtccacttgccgggatctgtgacagaatcgtcaatgttgccgtcgtttacgacagggtcatttttcacgacatatgagcctgtaatgacgtaatcggcgtcggatacgagctttttatcctcatcattaaatgtgcgctcggcgaagttcattttactgatggttaccggccggatctttttcttcttgatgagctgccggatggtttgttccatggatgctgtttgatcttcataaggagcggcaatgagaacgcggctgttctttttcggtttgaatggaagcgtacggtttttgttttgtaagacggtgacggatctttccgcgatttgtttttcagctttcagatggtttttgcttccgacggtttgctttgcttttgcgactttctttttcagacttgtttctttcggtgcgggatatatacctctttttattttcagggaaatgatgcgttccgccgatttgttaatttgctgaagcggaatttcccctttctgaacagccttttttaaagcggaaagaacttgggcaaagcggttttccgtttgcagtgatgtcacttgggccggcatcagggcgatatcgactcctgcttttacggccatgacgaccgcctcttcctggccgaaatgatcggcaatggctttcatatttaatgcatccgtgacaatgacgccgttaaatcccatttcctcacggagaagatgagtcatcacttttttcgagagagtggctggtacgaggatgtctgaaccgtccagcttgcttttataagttgtatcgtcaaaagcgggaaattgcacatgggctgtcatgatcatatcggccccggcctgaatggctttccggaacggataaagttcaatctgacgcagcctttcttgactgtgggtgacaagcgggaggccgtagtggctatcgacatccgtatcgccgtgtcccgggaaatgtttgacggcggcagcgacatcctgtttttgctgagccttcattgaggcaaggccgagtgatgctgtcagatcacggtctgagctgaatgacctgacgccgatgaccggatttccgggattattattgatatcgagaacgggagcgaaattcgtattaatgccaagtgccttcagttctttcccgattatggcgccggtctgagacgcataggctgtttttctcgcggctccgagcgccatattgcctgggaaatgagtgccttcaccaagtcttgttacgatgccgccttcttgatcaatgcttaataaaagcggaatatcaggactcgctttttgaaaggcatctgtcaggcggaccgtttgctcagtgttttttacattttctgcaaatgagataacgccgccgaaccggtacttttgaataagccctgcgacttcgtcattcatttgggtaagagcctcaggggatgactgccccttcttttgccaattgcgaaaatcaggcatgagcatctgccccagtttttcatctaatgtcatgcgggataccgcttgttccgcctgtgacggaatgtccggttttgtcgatgcatgatgtgtgccggaaacaatgaacaacagtaatacagctgagatgacaagtttcataatgatgtcctcctgtcgtcatagtgtagacaaaagacttggggtgtcattcaatggcttcgtaaatcgcctttacaacgctgccgtaacttccggtcgggaaaagatccccttcgaaaacattggggctttcaccggggctgacgacgggggaatgctttttgttggtcaaaagtgcgatccccaggttataagcggggtcaatgatcgtgacggtgccggtccatccggtatggccgtaagcctgcctgcttgcatatgggccgaacatccactccatatcagggctgccgtttttccgccagccgagagcgaaagtcgggtcagatgaagccgccgttgtgaacagatcggccgtttgtttattgaagagagaaacgtgtttgtaggtgccgccgttcagcatgacttgaagaaggacggccatgtcatcagctctggaaaacagtcctgcatggccggacactccacccattgagtaaaaagctttttcgtcgtgaacctccccttgcagcgtatacgtcctgatgtgagggaaatggatggccccgtcacgcgtgttgcctaaacgttcagtggctgcgaatgctttttctttgaagcctttttgcagcggattgaacagggtatgcgttagtttcagcggtttatacagttcttgctccgcataagcatcgagggtttttccggttaggttttcaatgatgcagccgagaagcatgtaaccgatatcactgtatacgtgctttgtccccggtttgtattcaagcgggatttgggtgagaaaacggatcgttttgtcccgttgttgtgaataaaaagggcccgccgtgtcaggctgatagaaataaaaacttgccggcagaccggagtgatgctggagcacatcaatgacgcgtatgcggtctttcccttgaaccggatcgctttttctgtctttgaaatcgggaaggtaagccgagactttttgatatacatcaagcttcccctgactaacgaggcgctgtaatgcaaaattcgccgcgtacatttttgtattggaggctaaatcaaacatagttgatgttttcatttttttcggatgggataaaaggacgtttccgtcatattttttgctgtagccgtatgctttcttttttatcacgcgtccgtcctttacgacgacgaggacggctcccgggaatcctgctacaatgtctttttcaatcatttgatcaacctttctgagctttgctgtatcgtataatttggattgggcgaaggctttgtgctgcggcagaaaagagaagctgatgaccattgtgagtatggcggctgccaatgttttcatattctgattcctcccggctaatcaaattcagcagccatgtcatccgtaaacccgaaagcataagtgaagacaaagcccgccgcgtaagagatgaatagaccgatgatatacaaaacgatctgggccggctgtacgagaaatgagagcggaaggccggagacaccgattgaaaaagtggccacttgaaaatgggcttgaaaggcgccgccgattcccgcgcccaaacacgctgttaaaaacggtctgccgagcgggagtgtgacgccgaagatgagcggctccccgattccgagcagaccggatggaagtccgcctccaatcgctcttttcaatgaggctttttttgttttcataaagatggcgaaggccgcgcctacttgacctgcgcctcccatcgcgagaatcgggagaagcgggtcatctccgattgatcggattaattccaaatgcacgggagtcaagccctgatgcagcccggtgatgacaagaggcaggaaggcggcccctaatataaaccccgacactgctcccccgatattcaatagcgacaataagcctgatgtaatcagatcagaaataaaaccgcctacagggataaagacgacatatgttaccagcccggtgatgagcaaagacaatgtaggcgtaacgataatgtcgatggattggtggacgtactttctgatcaaccgttcggtataagcgataaaaatcgcggcaaaaagcacaccgattaatcctcccctgccagggagcagattctctccgaacagactgatattggcgatctcagggttaaggatcaatatccccgcaagaccgcccatcgcgggtgtcccgccaaattccttcgctgcattgatgccgacaaggacgccgaggtaagcgaataagcctgaaccgataaccgttaatataagcgcgatttgggattctttcgggagccagccggcctgaatggcggctttcgtaatgccggtgattaaacctgatgcaatgagtgcgggaataagaggaatgaagatgcttgatagctttctgagaaacagggtgatgggtgttgtgttttttctgttgagatcagctttttttcgtgaggcggcttcttttaaatcaatgttttttccgggtgacataaggtttgcgaaagcgtcggcgacatgattgacgacacccgcgccgagaatgatctgcagcgtttcggcttcgacgacgcctattactccgtcaagccgtttcagcgcttcaatatccgttttgtcctgatcgaaaggtgtaattcttaagcgtgtcatacagtgggtaaagcctgaaatgttggatgaaccgccgcaattgtccagaatatctttggccagcgcatgataaaatgcctctttgctcatggaaaccctcctctttcagtacaattttcccgcggagctttgcctgaaacgcgtcttaaaagcgcctgcgccgatcatgaaaacggcgcgggctcgtaaagcactttatgatcattgactggggcgttctgaccaagggatgatcagcggtttttttctcttgaaatatgctgttcaatggctttgtcaatgaagccttctgcttctttgagaagtgcttttgcgtgtgtttcgtccgaattcgtcttcagcatgacgatcgccgttttgacatggctgcctgaggcctcaagcgtttcccttgccttgtcgtacgggacgcccgtgatgctttggatgatgccgattgcccgttctttcaatttttcattgctgacatgaacgtccaccattagattttcgtacactttgccgcttttaatcatcacggcggtggaaatcatgttcagaatcattttatgtgccgtcgccgctttcattcgtgttgaccctgtaatcacttcggggccgacgacaacttcgatgctgtgatcggcatacgtgctgatcaatgagtgcttattgcatgtgagggcgacggttttggcgccgattgtttttgcatatttcagcgcaccggccgcatacggagtgcgcccgcttgccgcgatggcgatcacggtatcgtcttcggtaagcccgattgtcttgagatcaagagcgccggtttcctcgctatcttcgattccttcagccgcttgcaaaaaggcgtctgcccctccggccatcagtccgatgacggtgtcgggacttacgctgtatgtaggcgggcattcaaccgcatccagtacaccaagtctgccgcttgtgcccgctcccgcataaatcagcctgccgtttcgccgcaatgactgatgggcaaattgaacggcaatttcaatatcaggcagcacctgctgaacggcgtccgccactttgaaatcctctcggttaatgatgcggaggatttccatcgtgtctgcttgatggattgaagcggtctctggatttcttgtttctgtggtcaatctgtgaatgttaagccggtctgtcatgaatgtaccctcccaagtcgttattacttgaagtatatgggcttctgaatatatgtttcaagaaaaatcggcaggaaagagatgaataatgaaacgctttcacaaaaaatgatgcagaatgtgctgttcgccgatcgggccgatcctgcgccgccctttatcaataaaaccggaagaccggtacaggttctgtgcacgatgattgcgatggttcactgcaagcacgatttcatcacaccaaggaaaataatttgcgacaaaagcggggagctgcagcatcgcttgtttggcataaccttttccctgctgcgccgcatgtaatgacagcgcgctcagcaaaatggcagacacattgttcgaatacggggcgatggtttcttttgaggtatgtaaaataaaaaaaccgactgggctgtcttcttttaaaatgactgtcggataacgatcccggatgacaagcgcctgcggcaggacatctttcgggagagcggagaacattttatcttcttcactgagtacaaacccgttcagcccatctgcatgctccggtttgtaaaaagacagggttacatccatgatatcctctccttttttataattgatccagttcatcttctgataacacacggcagcctgcccgttttaaaagagcggaagtgatgccgtccccgatgatctttttccccgagaaagtgccgtcatagataaagctgcttccgcaggatgggctgttttctttaaggatgaccgtgccggcgcctatttcttttgcgtatgccagtgttttttccgcgccggccatatataaagcggtaacgtcttcaccagatgccgttacgattttcgccgttccgttcagcacatcttcgcccgtgccgccgatgatttccgccggttcgcggggagtggtgaagccgcccaaaagttcggggcagaccataacagctttcttttcatccacgagtctgcggattttttccgaagcggcgtgggagccgttatacctgcattcgataccgccgagacaagagctgactaagatcatctgtgtccattcccttcaatatttatgatacctccatcttaaatgaaataagaaagaagggatgagtttttcagttaaaaaacgggtaaaaaagtttgaaaataaaaaaaataatttttctctttacaaatagggtacaacctgtatataataacttttgtcagctcgacgcggacacaacggcccgttggtcaagcggttaagacaccgccctttcacggcggtaacacgggttcgaatcccgtacgggtcatatggaggattagctcagctgggagagcatctgccttacaagcagagggtcggcggttcgagcccgtcatcctccaccatatttgccggcctagctcaattggtagagcaactgacttgtaatcagtaggttgggggttcaagtcctctggccggcactgtttttctgaaaaatacggaggggtagcgaagtggctaaacgcggcggactgtaaatccgctccctcagggttcggcggttcgaatccgtccccctccaccatttttgggctatagccaagcggtaaggcaacggactttgactccgtcatgcgttggttcgaatccagctagcccagtctcagacaccttttacataaggtgtctttttttacggtattttacctcgatttccgattgttcatcagatatactatttttaagctgctgttaaggcagtatattctgtattttccatctacaccctgcctgaaatttggtaaaataaatgtaataaaaaaaatgaaaccttttaaaacaatcaacgtatagatacagaccggtgaagggcagaggtaagataaaacatggaaaacctgattaaaaaaagaattaagcaagtcaaaaaaggcgatcaaaatgcgtttgcggaaatcgttgacctttataaagataagatttaccagctttgctaccgcatgctcggcaatgtccacgaagcggaagatattgcgcaggaggcttttatcagagcgtatgtcaatatcgacagtttcgatatcaacagaaagttttcaacgtggctttacagaattgcgaccaacctgaccattgaccgcatccgcaagaagaagcctgattactatctggatgcagaagtggcgggagcagaagggctgacgatgtattcgcagatcgccgcggacggggttctccctgaagacgccgtattgtcattggagctgtcggacacaattcagaaaaagattttaaagctgcctgacaagtacagaacggttattgtactaaagtatattgacgaactctctttaattgaaatcggggagattctgaatatccctgtcggcaccgtcaagacaaggattcacagaggcagagaggctcttagaaaacaattgagagatctttaagtggggtgatgaaatgagctgtcctgaacagatcgtgcagcttatgcataagcatcttgatggagatatccttcctgaagatgaaaacgtattaaaacaacatttgcggtcatgcgagaattgcaaacggcattttcatgaaatggagaaatccgtagcgctcgtccgaagcacatcgcatgtcacagcccctgctgattttactgccaaagttatggcgaatcttccaaaagagaaaaaacgcgcttctgttaaacgatggatcaaaactcatccgatcattgcagccgcagcggtttttgtgattttaatgggcggcggttttttcaacagctggcataacgaccacaatttcagtgtgtccaagcagccgaaccttgtcgtacagaatcacacggtcaccgtccctgaaggcgagaccgtaaagggcgatgtcacagtaaaaaacggcaagctggtcattaaaggtaaggtcgacggcaatgtgaccgtcgtcaacggagaaaaatacatggcctcagccggacaagtcaccgggcagattgaagaaattaaccaattgtttgactgggtctggtacgaactgaaatcggcgggtcagggcgttgtgagcgctttagacccgaatgaagatgagtaaagcgtataatcgctttactctttttttacggattgccgcgctggctcatttcacttgagaaatcaaaatgtggtataatgagcacgctatatgatgtacatattgctcatgcagcgcaattcataacggaaaaacgaaatgactgaattcttggaggacgaggaaatggcttttgaggacatcccatttttgcaatacctcggcaatgccgttgatattctccttgtttggtatgtgatatataaattaatcatggtcatacgcggaacgaaggcggttcagcttttaaaaggaatcgtcgtcatcgtattggtccggatggccagttcatatttgggactcagcacacttcaatggctgatggaccaagcgataacttggggatttttagcgattatcattatattccagcctgagctgaggcgggcgcttgaacagctcggacggggccggttcttttcaaggagcggcacccccgtggaggaagcgcagcataagacaattgaagcgattacaaaatcgatcagctacatggcgaaacgccgcatcggcgctctcatcgccattgagcgcgacacgggaatgggcgattatattgagacgggcatcccgcttaatgcgcaggtcagctcagagcttttgataaatatcttcattccgaatacgccgctgcacgatggagcggtcattatgaaaaataacgagattgcggctgctgcctgttatctgccgctttctgaaagcccgtttatttcaaaggagctggggacgcggcacagagcggctgtcggcatcagtgaagtgacggacagcttaaccattatcgtatccgaagagacgggcgccatcagtgtggccaaaaacggagaccttcacagagaattgacggaagaagcactgaaagaaatgcttgaagctgagtttaagaaaaacgccagagatacttcttctaaccgctggtactggaggggcaagaaaaatggataaattcttaaacaaccgctgggctgtaaagatcattgcattgctctttgcgctcctgctttatgtggcggttaacaacaaccaggcgccgactccgaaaaagccgggggaatccttttttccgacatcaacgactgacgaggctacgcttactgatattcctgtaaaagcatactatgatgaagcgaattacgtagtcaccggcgtgccccagaccgtgaatgtcacgattaaaggctcgacaagcgcggtgaaaaaggcgagacagacgaagaattttgagatatacgctgatatgaataagctgaagaccgggactcataaggtcgaattgaaggcgaaaaatgtatcggacggactgacgatatccattaacccgtcagtcacgacggttacgattcaggaaaaaacggctgaaagttttccggttgaagttgaatactacaataaaagcaaaatgaaaaaggggtatacgccccagcagccgattatcagcccgaaaaacgtacagattacgggttcaaaaaatgtgattgacaacatttcgcttgtcaaagcatccgtgaaccttgaaaatgcaaatgagaccattgatagggaagtgaaggtgaccgtctatgacaaagacggcaacgcacttcctgttgatgttgaaccgtcagtcattaaagtgacggttcccgtggccagcccgagcaaaaagctccctttcaaaattgaaaggaagggaagtcttcctgacggggtgagcgtggcgagcattgactcgaatccgagtgaggtgacggtttacggcccgcaggatgtgctggattcacttgaatttatcgacggtgtatctcttgatttagacaaaattgataaagatacggatgtcgatgccgacatcccgcttcctaagggtgtcacaaaggtgtcaccggggaaaattacccttcatgttaaggtggacagtgaagacaaaaaggattttagcaatgtcccaatcaagacggtcggactgggaggctcgcagcggattgagtttctcgaccctgaatcgcgggcgatcaatattacggccaaaggctctccgtccaacattaaggcgctgaaaaagtcggacattgagctgtatgccaatgtctcgggcttagatgacggagagcattctgtaaagcttgaagtaaacgggccgcaaaatgtcacatggtccttgtcaaaagacacggttaagatcaggctgacttctaagaaaaacacaagttcaaataaaaatgacggcggctccgctgattccggcaataaagacggcacaagcggaggcgcagacaaagacaagaaccaggaagacactgacagcgatcagaataaaagtcaaaaccaggatcaaaatcaagaccaggatgaagacggatcaagtgctgattcctcttcaacagaatgaaaaaggagcgatacaaaatgggcaagtattttggaacagatggtgtaagaggtgttgccaacagcgagcttacgccagagctggcctttaaagtggggcgttttggcggttatgtcctgaccaaagataaacagcgcccgaaagtgctgatcggccgcgatacacgtatctccggacatatgctggagggagcccttgtcgccggacttttatcgatcggagctgaagtgatgcgcctcggcgttatttctacgccgggggtatcctatttaacgaaagcgatggatgctgaggcgggcgtcatgatttccgcttctcacaatcccgtgcaggataacggcattaaatttttcggaggagacggctttaagctttctgacgagcaggaggccgagattgaacgtctcatggatgaaccggaagacaaactgccgagaccgacaggcgcggacctcgggcttgtgaacgattattttgaaggcgttcaaaagtatctgcaatttttaaagcagacggcggacgaagatttcacgggcattcatgtagcgcttgactgcgcccatggtgcgacatcttccattgcgacacacctttttgccgatcttgatgctgacgtgtctacaatgggaacgtctccgaacggcttaaatattaatgacggcgtcggttctacacacccggaagcgctgagtgctttcgtcaaagaaaaaaatgccgatatcggccttgcgtttgacggagacggcgaccgccttattgccgttgatgaaaaaggaaacatcgtggacggcgatcagatcatgtacatatgcgcgaagtatttgaaatcagaaggccgtctgaaggatgatacagtcgtatcaaccgtgatgagcaaccttggtttctacaaagcacttgaaaaagaagaaatcaaaagcatccaaacggcagtcggtgaccgctatgtcgtagaagcgatgaaaaaagacggctataatgtcggcggcgagcagtcagggcaccttattttccttgattacaacactaccggcgacgggctcttgtcggcgatcatgcttgtgaatacgctgaaggcgtcggggaaaaccctttcagagcttgctggtgaaatgaaaaaattcccgcagcttttagtaaacgtgaaagtgacggataaatataaggtagaagaaaacgctaaggtgaaggccgtcatttctgaagtggaaaaagaaatgaacggagacggccggattttagtgcgcccttcaggcaccgagccgctcgtccgcgtaatggcggaagcgagaacaaaagagctttgtgacgaatatgtcacaaaaatcgtggatgtcgtgcggacagaaatgggagcggaatagcgaagtttataaacagagagcgaacaagacaagtgcgatcagcataaaatgatagtaacatgatgccgggacggaaaaaaataattgaccgtccttggcacatgttgtaaaatcaagcttgttcagcctttgtttttcatttataggaaaggcggcattgtttgcatctttcataattatagcgcccgaactaagcgcccgaaaaacggcttagttgacgaggatggaggttatcgaattttcggcggatgcctcccggctgattcatttagatcacagccgtaaggatttctttaaaccggaggggcgactctccgaacaaagggaaatcacatgatcttccaaaaaaacatgtgggaggggacgattgaaagtccccttgtaatctgactttcttcgtctccttttacacctttaggaggaagaaaaaatgtgtggaattgttggttatatcggtcatcttgatgcgaaagagattttgttaaaaggattagagaagcttgagtaccgcggttatgactctgccggtatcgctgtggcgaatgagcagggcgtgcatgtgtacaaagaaaaaggccgcatcgccgaccttcgtgaagtggtggatcaaacggttgaatctcaagcgggaatcggccatacacgctgggcgactcacggcgaaccaagcttcctgaacgctcacccgcatcaaagcgcacttggccgctttacacttgttcataacggtgtgatcgagaactatgttcagctgaagcgtgaataccttgaaaacgttgaactgaaaagcgacacggacactgaagtagtcgttcagatgattgagcaatttgtagcgggaggactcagtacagaagaagcgttccgcaaaacactgactctgttaaaaggctcttacgcaattgcattatttgacggcgaaaacacagacaccatttacgttgcaaaaaacaaaagccctctgttaatcggccttggagatacttttaacgtcgtggcatctgacgcgatggctatgcttcaagtaacgaatgaatacgttgagcttttggacaaagaaatggtgatcgtgacaaaagacgaagccgtgattaaaaaccttgacggtgaagtcatgacacgtgcgtcttatatcgctgagcttgacgccagtgatattgaaaaaggcacataccctcactacatgttaaaagaaacggatgagcagccgcttgttatgcgcaaaatcatccaaacgtatcaggacgaaaacggcagactggctgtggctggcgatgtcgctgacgccgtggcggaagcggaccgcatttatatcgtggcttgcggaacgagctaccatgccggtcttgtcgggaaacaatatattgaaatgtgggcaaacgtcccggttgaagtgcatgtagcgagtgaattctcttacaacatgccgcttctgtctaagaaaccgctctttattttcctttctcaaagcggagaaacagcggacagccgcgccgtgcttgttcaagtcaaagcgctgggtcacaaagcgctgacaattacaaacgttccgggttccacgctgtcccgtgaagcggattacacattgcttctgcacgcaggccctgagatcgccgttgcatcaacaaaagcgtatacggctcagattgccgtgcttgcgattcttgcgtccgttgcagccgaacgcaatggcgttgatatcggttttgatttagtcaaagaattgggtatcgcggcaaacgccatggaagccctttgcgaccagaaggacgaaatggaaatgatcgcgcgtgagtatctgactgtttcaagaaatgctttcttcatcggccgcggccttgactacttcgtatgtgtcgaaggcgccctgaagctgaaagagatttcttacatccaggcggaaggcttcgccggcggtgagctgaagcacggaacaatcgctctgattgaagaaggaacaccagtctttgcgctggcgacacaagaacacgtcaacctgagcatccgcggaaacgtgaaggaagtcgcagcccgcggcgccaacacttgcatcatctcgctaaaaggtttagaagacgcagacgacagattcgtcctgccggaagtcaaccctgcgcttgctccgctggtatctgttgtaccgttgcagctgattgcttactacgctgcactgcaccgcggctgtgacgttgataaaccgcgcaaccttgcgaagagtgtgactgtggagtaatatatttaacccctttggttattatatttgtagttttataaaaaagattgatcatttataataaagtttgattgaaaataacctcttcggtatgatatccgtaagaggttattttttattattcagataaaaggcggagtgaaaatgttacccaaatataatcccaataatccgagtctattagaatcgatagtttgttttactgatattttaggtttttcaagtttaattataaacacacctaacctacagtctggaaatcacttacttaaagatcttcataaaattcttacaaaacaatatgcgttaatgagagagatgaacccatatggtcattttaaaacatttactgacaatgtcatactagcatatccaagatttgaagatggtgaagggcaatcaggtaatttgtttatgtcatttattgattaccaattagagatgacattaaatgggtatttcttacgtggcggtattgatttaggagattactatggtgatgatgattttgcttatggaccagcgttaattgaagcacatgatttagaaagtagtaaggcaatttatcctagaattattttaagtgatgaaatgattaaaatggtatcgcaacacctgggctattatggttctgcatcatatgctccacagaattcacatttattaatagatgaagatgataaagtttttgttaattatttgtatggactacatgaaatatataacacgactgaagatatcatggaatatattcaaaaaattcaaagtcacaaagatattattttaactaaattgaaccacttcaaaagcgataaaaaactttattctaaatacgagtgggtagctcaatatcataattattactgtgatgagtattttgaaaagaatgcaattcaacaattcaatttgaaaatacctagtatacagacacgtaatttttctagaatagctataagtgatttaatacttatttaaatttaggaagaagctaaagatagaatgtccaagcgaaaacgttcgccctctattggtaagaaatataaagaaggtttcggataaggttaggggctaattataagccgtgggtgacaattcaagatgtaccttcattgggtcacgttacacgtacttctatttgttagaatattacgatttggtaattgatatacgtgaacaatatccactgctatctgttgaagaaacaatcgttattgcagatgagagtttgaaggagttttctggtttgtttatttgagtgatggtgttactgaaaggaagtatgtgattgctgagttcaagctatttccaaataagaagtcagcatgattgaagtagaacgtgaagacagagcatttttcaactttaatatgtttcattaataaccagcagaataaaagctattgttatcctcaaattttaagtggattaattgatagtcatagaactaaagtaataatcagaaaaatttactaagaggtaatgttatgtataaagatatagcaattaattgggatgtgtttcaatataaatttactgagaagactagagatgtatttgaatatttagcttatatacttttttgtcatgagtttaaaatcgaaacaggaatatttagatactttaatcagccatatgtggaaactttacctgtaacaactgaagaaggatgtattggatttcaggcgaaatattacgatgcaggcactagtattgctgataaaaaaacagaattaaaaaatgctattaagggcgcaaaaactaaataccctgaaattgatagatttataatttatacgaataaagaattgagtgcaagtagtaagaaagatactgtaaagcctgaatatcaaacagaaattgaagaatatggacttgagagagatattcttgtggaatggagagtcaaaagtaatttcgagataatgttaatgagacccgaattggaacttattagagattatttttttaatccagattcaggaattaaagggtacttagctcaagttaaacttcatagtcaaagtaaattagagaatataaagtcaactataagatatagagaccaaatcattaaaataaataaaaataatgattttgatatccactctttttatgagtcagaaattccatgtttaattatttatggtgaggggggatcaggtaagtcgggctttgcaaaagatttattagaaaatgaaaatagagctaatatcgcttttaaagcgacagattttgatgttactacttttgcagagttctcaaggagatttggagagtatacttttgaagattatttaaagcttttccaagacgatgaaaataaggtttgtttgattgattccacggaaaaagtattagtgatgaataaccgagatatatttaatgagtttgtgaacttatcgattaagtatggatggaaaattatttttacagtaaggacagtacacaaggataattttattaatacttttttaaatggggtaagatatcaagaattaaagatagagactttgtcaaaacaagaattacaatatttattaaaggattcagattttcctcttccgaaagaagaatcctatattaatctaatttgtaatttgttttatctgaatttatatattgagatagcttgtgaaagcgatagcgatattttaacaattgaacaatttatagaaagtatatggacgtataaaattaaaaatactaatcattatagagagttagatattcgtagagaaaagactatttgtaatattgtcctatcttgtgcgaataagggtgtatattactatgaatatcaactatatgatgattcagaagcaattgcggcactcagggaagatgaaataatattctatgatgaagttatgagaggatattccttgagtcatgatatctacgaagaaattgtattaaaacatatatttgaaaatttatatattaagaaagaagactgtaaaagcttttttgaagagattggtgacagtttagttgtgagaaaaaatcttcgtttatggcttaaagataagttggtacaaaaaactgaaggtattaaagattttattatagaagtattttatacaagtaaaatttcttcaatttggcaagatgagattttgataactttaatgagcattgaagataatcaaatttcaataaactttataaaatccatgttaactagagatgaatacaaattattattcagggcaatattcttattaaatactacgtgtagaattataaataatgacttttggaataaaattttaacttctgaagaacaaaaatctgcaaatctttatagatccacaaagccaactggagcaggatggggttatatttttaatttcatctatgaaaatctaacagcaatagaatggaaacctcaaaatataatgttagttattgaatgtttatatagttggacttcacataatgtaaaaggcattgaaaccaaacatgcaggtttaattgcattatatttatacaataaagtaaaagctgataaatcattaatctataagttaaatgataaaaaaatcgagaaaataaataatgtaatattatcaagtgcctgggaaattgacagtgagttatctatcattgtagaagaggtaacaacagatacagattttaatcatctgcataaatattatgatttgtgtgtgcagggattaactaatgtatacaattgtggaaatttagttgactcgaatcctaaattagtatttgatttagcaaataaatattggttttttaaagacagtatgttttatagtccacgtgaaattgaagatgcttttaaactaaatgactcaacttctcatgattattatccatcaagtgcctttcaaactcctatatttagactattgcagtctagcccttgggagacaatagattttattatagagttattcaataagataaccatagattactccaattcggaattggtcgagaagtatgatgaactcttaacaattaaaattaatctatctaatggaaaagaaatagagcaagtagcgagcgaacgtttatggctgatgcacagaggtacatatccagctcctaatttacttgaaagtatcctgatggcgttagaaagatggttattacttgttttcgaagaaataccaggtgttatagaaaagatttgtataaaactattaagttctcaatcggcagctctaacatcagtagtagtaagtttagtggaggcataccctcaaaagttatttaacatcgcatgcatattaatttcttccaaagaggtttttatattagataacatccgagctgttaaagaatttggttcaaattttttgaagggtgtagttccggctaacaaattgtatgaagacgagagaataaggaccaataatcaagcttttagaaagaaaaggctagaagatgtaattcttgagtatcaattaaatttagaaaaactacctattgaagttttagagaatagaaataaaattttatatagtcaactcgataaagtgtttgagaaaatagagcaatttgaggaagaatatcaattcgtatactatagaatggatatcagaaaattaaagcttgatactgataattttttcgaaaaggatggacacacatatgcctctttggtgacagaactacctgcttctctagttgaaattcataataaaacggaagagaaaaacagaaaaatatttaatagaaatgatttgtatatgtggtcaattgcacgttttgagcataaaagggatagtgaaaagtatatagactatgaaaataatcctttaaaagccttaggggaagctagagaaatttgggagagtgaaaataatgaatatttttatcttcagaagtatgctccgatatatgttttcgctatattaataagggactataaagaattaatttcagaagatgactgtcactactgtaaagatagtattttaaattttattgaattgaacattgaaagtgggaatgttattcaaacaggaagtggttttgaagcggcaatttatattttgccactaataatttctaatgaagatatgagtgacatatctctaaagaaatctattgaattacttttaatattaatactagattctaataaactagtaattcaaactttttcaaccaaaatgtgggaaacaaattttaaaatagcatcaggtattttctgtggttatgttgaattaaaacctctatatgattcagaggttagaatatataatggaatttcatcgattgaatttatcaataaaaatcaacatgtaataaataatattataaaaaatgtctatgctattcctaatgatttttcacatttaagttataattcgttacttaatttaaatatgcttttggcaccaactaatgagattactgtaatgaaatcaatagaaatcggaaaaaatatttgggaaatcttatttgaaaaacgacataaaagaagagaagatgttgtagcaaatatagaaaccgaaatggagtatattaaatggttggcaaaatatttgatgtgtatatcattagaggaacaaaagaaattaataagagcttttgaaccatttataaatagttgtgaaagctttgaatggcttttaagagatattattcttaaacaagatgaaatggataagtatgatgagttttggaatatatggaataatattcaacctattataatatctttatgtaaaaaaacagaagaaagggatagaaccgtttcttcaagagaatatcatgatgatattcatcaaatagttataacttatttatttgcattccactggtggaacgataagataaaatcttggcattcattaaagaaggatgaccatttattttttagatatataagttatgaattaggttataagccaggtgttttgtatgcgattggaagagttttaaatactgttggatataataattatctttcacaagggattgattggttatatgaaataattaacaataatccgcatcttgaacaaaaaaagttagaagtgaatacggaatattatatagaagagtatatgcaacgatatattttagaaaatagattgagtttcaagaaaaaacccgcattacgtaataaagtgatagttgttttgaattttttggtcaatagaggttctacagttagttatatgctaagggaatctattgtgtagtaaaaatagttgaatgctaacttaagattattatctttaaaaataaatataaaatagtaggagtgtatttaatggtgaaatgtaaagaatgtcaaggcgcatgacaaatatgtcctgactttaccggtcagcagaacaaatattgttcaaagtcactatttcttttatcttttggttgttgtgatcggggctgtaatatcttatggtattttctttgtatacagcctgagtgctgaggaacctgttgacggcattttgaatattgtctctttcggaacgttcatcgttctctttgccggtgcaatcgtttatcctcttctctacattatgggcccggaaaagtctgatgcgattgtgattggaggtgcaatgggagggctttttactacctttggattgcaaagtgtcgttggttatgtaacagaaaaattaccactgtcatttttgcacataaatccttctttatatgtccctattatatatatcattatcggcgttatattatatatcatttcttttttcattgccgcagctatctatcgtaaaaaagaatttacaacaggataaggcatggcacgggctcataaatttacttaaattccaagcagaaagccgcccgcacaatgggcggctgttcttctaattaaaactgcgttgtcacatcgtactcataatcaatcttcaattttacatttttcatagtcgatttagctgttgcgagtgtgttgtatttaaaattccagatgcttgccgctgtgaggttatcatccagtgtaataccgtaatttccttgtgtggagctgtttgcaagtgcacggtgccacactttattttcttccgacatgatgtagtggcttgtatttccttggcttggtgtttgggttgcggtggtgttgattcttttcactgtggcgtctcttggaatgcttgtctgtttggttaagtcgagtctaagagcagttgaatctgatccattcggactgaggcttgtatttccattattttcagctgtgccgctgaatgagaaagtctcactgccggatttgattcggtcgtaaatggagagtgtaaagtacatatcgtcagtgtaggagccgcgggacactttcacgtagaacgtctcgttattttctttcgcatctgtattcgcatagataaaaggcagtgccgtatcaggatttatcacttctgtgcctttactgatcagtactttatttttattataaatttcaatgtccattcccttgtattcacttcttgttgaactcctgacataaagtctttctcccttatttgccgtgaaagtgaaatacgaatctttttccccttttggcaatatggcagtatcaatatttttatatttccagtagcctactggattggcagtttcaaatgaatgatttcctgtaatggcgcttatttgtaacgagttcttttgagacgcagaggctgaaggtgaagatgcaaacaatgcgcctgataaaacgatgacactgacaaatagaatcaatatacacttcttcatggaaaaatccccctttttgactacatcatacataaaaacattagctatgtaaacatttgttatttaaggtcaaaatctactggaagacagccgataaaaacactagaacatcatctcaagcggaggttaaaaacatgcgcctaaacgctcgatatataaaaaatcaagtaatggctcagcaagtgcttcagcggtattcttccaaaacaaatgtgaaagatgcggcaaaaggaacggacagcttattgattcaggcaggcgggagccgcgatctgagccaggtgaattattcaaggagcggtgtcactgagaaagggagcagcctgtcccgtttatatcaatccgcaaatcagaaaaccgttacggatactgggaatgagacggtgattcaagccaataatccgtatgagtctgagagtgatattgcgagcaagattcttaatgagaaatacagccgtatcaacgaaatcaataaacgaaagcctgatcctttaggttatattaaggacaaatatcagcgtgccaattcgccttatttcaggagtgatttatcggaatcagagcgtcaggccgcttatcataatgaaacggaatggctgtttaaagggaaagcccaaagctatgattttcgtgatgcggcatttcggggtgaaacgctcagcggagagattgagggagaaaatgaaaaggtgtttcagcgcgggcaggtcaatcagcagattgagatgcttttccatcggaatcatattcagattccggagggcgcgaaccttacatttacgatatcaccgattgattatctgttaaaagtgagcggaacggacgatgaagagctcactaagcagattgaagccgtcttaaactctggggaaaacagcaaagagctgtttgcgcacatcattcggagccggagtgatgattcctcgcagtttacggcagaagcgtatgagaaatatcaagtcgttcgggaaatgtatgaggtgaccggctatcatctgaaagacttgcagattgtgaacggaaagtacgtcacagaagacggccgcgaccttttagacgtctataaagaagcgctgcagcaagatcctttgctgagacatacggccgcagaagcagccgcccattacggacaggggctcacgaagctggcgagaacggggtatgatgccattcctgatttggtgctgtcaattgattatagagacgggtctctgcgtgacgtcggccaacgcaagcaatacggatcaggggatacggactggctttctgaatggaagcggcagctgggcgtgcgtatataaaattaaaaagctgacgaaatctcttcgtcagcttttctatattcgtcttcttaaaattcctcatactccgccgggtcttggccatttatgcgtccgtccgcgcgggtaagcgaatcgatgatcttcatgtcattttcatcaagggagaaatcaaaaacggagatgttttcaagctggcgctcgggcgatgctgattttggaatcgggatggcgcccagctggatatgccagcgtaaaatgacttgagaaatggttttgccgtatttgtccgcaatctgtccgagtttttgatcgttcaatacttctccggcgcgggataacgggctccatgattctgtcacgatgccctgttcctcatgccattgacgctgctgctgctgattaaaagcgggatgtaattcaatttggttaatgcctggctttacgccggtttcacgttcgagccgttcaatgtgttcaggcaggaaattgcagacgccgatggaacggatcaggccccattttttcgcatcaatcagtgcctgccatgcttccgtgtagcggtcttgtttcggattcggccagtggacaagatacaggtcatagtaatccagaccggcgcgatataaagattcttggattgtctgtaccgctttgtcatattcatggtagcgccccggaagtttggacgtcacgtataactgttctctcggaactgagcttctgcggatggcttcaccgaccatcccttcattttcatagttataagcagtgtcaatcaggcggtagccgatatcaatggcgctgttgacggcatgaacgccgttgttcctgttaagagcgtatgtaccgaagccgatcgcgggaatgcttgtcccatccagcagtttcttttgcggaattgctgcagtcatcattaaatccctccttggtttctactttaccattaatcttacaaatgaaacataataatggaagaaagtgagatgacctgcacatgaaaaaagctgacggaaaaccgccagctttatatttgaaacatccatgcaacgacggggccgaagaccgaccctaatacggcgcagagcgtcatggaaacagaactcatggagactgttaattctccgtattccatcgcttttgaggtgccgagcgcatgggaagcgctcccgaatgcgattccttttccgagtgaactgcggatgcggatccacttgagaagcagcgggcctaagatgacgccggaaaaccctgcgatcatgacgaacacgactgtcatggaagggaccccgccgattcctgatgcgatttgaatggcgaccggagttgtgattgattttggaatgattgacaaaatcaaactccggctgatgccgaacagttctgcaaataacaggccgctgaccattccggagaataaaccggccagcacgccgccgataatcggaaacatatacttgattaacatacggcgctgcttataaagcgggtatgccaaagccaccacggccgggccgagcagtgaattgatccattgtccgccgatcatatactctttatacgaaatatgaaaaacaagcagcacagcgattatgaaaatcgtagtcgtcagaacgggtatgagaaagggataaggaaagcgcacatataatttcaccatggccagataggcggcggccgtgaacaaaattataaggattgcgatacatgtttgctgcacttctttttctcctttctctgattggctttatgctctaacagctggctggcgtaccctgcggcgatcattgtgacgagagtgctcagcacaacgatcaaaaacagggccactccgcttgcggaaaacagtgacggataattgatgacccccgtcatggccggaatgaataacaacggaagaaaagacagcaaaaatcccgctccgtcttcaatcattttgacgggaatgatcttaaccgataaacatatgatgagcaggatcaaaccgataatgctgccgggaatgggcagatgacagagctgctgaatggctcccccgataaaggaaaatgcgaataaaataatgatttgcaatatgatgcgtatgactttcacgacgatgctgttctttggagaagagcagcttccccctttcttgttgcttcggtaagtttctttacttttggtgcatatatttgtactatacaaatatatgtatgcaaaaaatttctatatgttttctgagtaaatgtgcatatgtttgtattatacaactaatattgctgatgtcaattgtaaggagtgaagccgtttgtcaaaacaagatccgattgaattaattgaatatgagctcaccacttttattaggagggctgtttatcttgataactccgaccgcaaaatcggaaatctggaaagggcctcgtatttgttattacggcagctggatgaattcggaccggcgcgtgtgaaggaattggccgaatcctttaagcttgatatttctacattgtcgcgccaggccgcggccttggaggcgaaggagctgatccagcgtttatccgatccttccgacggacgggtcagtctttttgcgattacgaagcttggcaggcagaggttaaaagctgataaaaagatgcgacttgatcgatatgagcgcatgcttgatgattggtccggcgatgaaaaagaaatgttcggcaggcttttgctgcggctgaatgaggcatttatcgattagtgaatgatttttcccggttaagcaggattatggcgtatatgaaggagaatggaagagaggaggctttacgccattctgctttagctaaaattttatagaaaggggggcggaaaacatttaacccgggaaatagtgtttctcggagattgcagcttttattatctcaatattcataatttaataaaatgaaagcgctttaatttgagtattctggtttagggtgtaaggtgtttacctgaaaaaaacaattgtattttccacgaaaatttattatgatgagataaggaaattagagattatataacaataggaagatagaatatttctaatattgcgggaaatgaagattgagttaggttcaaacaggtgcaccttctgcttcattatttcacatatatctgagctgttaagaggaggaagcgaagtggcaaacaaagaattaaagagaggcttaggcgcgcgtcatatccagatgattgcgctgggcggcacgatcggtgtcggtttattcatggggtcatccagcacgattgaatggactgggccgtccgttctgcttgcttatgcaatctccggtatctttatcttttttatcatgcgtgcgatgggcgaaatgctctatgtagagccgagtacagggtcgtttgcgacattcggccataagtatatacatccgttagccggctatatgacggcgtggagcaactggtttcaatgggtgatcgtcgggatgtctgaaattatcgccgtcggttcgtatatgaaatattggtttcctgatctgccggcatggattcccggcattatcgccatggccattctcggtgcggcgaatttgatttcggtaaaatctttcggtgagtttgaattttggtttgccatgatcaaaatcgtaaccattattctgatgattgttgccggaatcgggattattttcttcggtttcggtaacggcggccatgcgatcggactatctaatttatggtcgcacggcggtttctttacaaatgggttctcaggatttttctttgcgttgtcactggtcattgcggcttatcaaggggtcgagctgatcgggattacggcaggggaagcgaaggaccctcaaaaaacgctgcgaagtgcgattcagagcattatctggcggattttgattttctacatcggtgcgattttcgttatcgtcaccgtgtatccgtgggatgagcttcactcactcggcagtccgtttgtttcgacatttgcgaaagtcgggattacggcagcggccggcttgattaactttgttgtgattaccgctgcgatgtccggctgtaacagcgggattttcagcgcgggacgcatgctttatacattgggcgtgaacggtcaggcgccgaaattttttaagaaagtttcttcgagcggtgttccgatattcggtacgcttgcagtattaatcggacttgtgatcggtgtcgtgctaaactacatcgcgcctccgaaaatttttgtctatgtctacagcgcgagtgtgcttccgggaatgatcccgtggttcgtcattttaatcagccatctcggtttcagaagagcgaagggcgctgagcttgataagcacccgtttaaaatgccttttgcgccagtgacaaactatttgacgatcgctttcttattgatggtgctggtcggcatgtggtttaacaaagatacgcggatatctttggtcgtcggggtgatttttctggcgattgtgacggtcagctattatgcgttcggcatcggcaagcgcatgcctgatgaagaatcgaaaatagaagacgctgtataactcaaaaggacacctctcttaaaggggtgtctttttcggcttgtccgcgagtggtatactggataaaaaaagcagaaccgggggaaacatcgatgagtcactaccgtacgttattatttgatatagacaatacgctgctggattttaccgcttcagaaaccgttgcccttcaaaaattgtttcaaggttcaaagctggacctgacggcagaggtggaggcccgttataaagcgttaaatcaagggctgtggaaggcgtttgaagagggtgaaatgacccgcgatgaagtggtgaatacaaggtttgcccttttgtttaaagaatacggcctcgaagcggacggcgtgctgatgaatcagacgtaccgccaatacttagaagaagggcaccagatgatagacggagcttatgagctgattgaaaggctgagtcctttatttgatttatacattgtgacgaacggggtgtcgcgatcacaatataagcggctgggcgactccggtctgtatccgttttttaaagatgtgtttgtttctgaggatacgggttttcaaaagccgatgaaggaatactttgattatgtgtttgcgagaattcccggtttttctgccgaacacgggcttattatcggcgattcattgagcgcggacataaaaggcggtcagatggcgggaattgatacatgctggtttaatcccgggaagaaagcaaatgagtccgggatcatcccgacgtatgagattcaatcgcttgatgagctgtatgatgtattgaaagtagaacgaaaagccgccgctcatctgtaaggagattaggatgaagattgcacatacgaagttactgatcaggggttttgcgttactatccatctttcatacgattcttcagcttccttccggccgggaggatctgaaggtttttttgtctgcactcgtggtgctgctgacggctaatgactgtctgcggccgatatatatgaagagacggcccgccatatataacggatcttttctcctgagcaacgtgatggcaggatttctgctatacaatgtctattgtgcggggacgcaggccataatggtgcttttattggtggaggtccttatcactgatcatcagatttcagctgttttggtaacggtgaacgccgccgcatttggcggagctttatatgccgccggagcgggtgtcagtgatattgtgctgccatacttcatcatgtttgcggtgatttatttatatcggaaaaatctgcaggagaagtcgaaggttgaattgctgaaccgagagctgaagacggctaacgccacattgaaggaatattcggaccgcattgaggaactggccgttacgaaagaaagaacaagaattgcgcaggagctgcatgattcgctcggtcattatctggctgctctgaaaatgaatttggaatttgccgggaagacagccgggcatcaaccggagagagtgaagcagatcattcataaggcgcatgatcttacgaaagagtccattttgaagcttcgccaggcggttacgctgctgcagggctctttgtcggggcgggaatttgaacaagcgctccgtgacattttcagccattttcaagaggcgggcagcatacgtttcgagcttgagatggatgcagccatagaggcggcacagccggatgtgaagcactgtctttatcaatccgttcaggaaacgattacgaatgcgatgaagcacggacatgcttcttatgtttccgtccggattcaaaaagaccggagcatgatagcggcgcatatttataataacggctcagcctgcggaacgatcgtaaaatcaaacggtctgaaaggaattgaaaaaagagcggccgcacttggcggagaagccgttttctcttccggaaatgaaacgggttttgacgtgaaaataaggattccgtgcaaggaggaatgatcaagtgaatgtcatgatcgcagacgaccagtctattgtaagagaggggctgaaaatgatcctgagcctccacgaaggaattgaagtatcaggagaagcttcctgcggcgaagaagttctcaatctgcttccgcaaactgaaactgatgtgattttgatggatatcagaatgcccggcatggacggaatcgaagcgacaaaagcggtaaaagccagatatccgtctgtgaaagtcatcattctgacaacgtttgaagatggacactatatttttgccgggctgaaaagcggtgctgacggttacatcttgaaggatgctgactcagatgaaattgtcgcctctcttcaagccgtttgtgaagggaatatgatgctgaatcccaaagtcacggttcaagtcgtaaaagcgctcaatcatatggacatccctgccgtgcaagaggaaccgaaaacaaatctgacggagattctcacgccgagagagcttgatgtggcaaaacacattatggaaggcaaaagcaataaacgcattgccgcagacttgtttctgactgagggcaccgtgaagaactatgtatccagaatcctcgataaacttgaagtgtcaaacagaaccgagcttactttatatttgcaaaaaatgatataacccccgcttcaccctcctctctttttatcttcaaacatatgacgaaagtaatatccatatcgagtacgaaagtgaatagaaaacaagaatttcaaagagtagaataagtgcagacatgacacaaggagtgctgcacgaatgctcgaattaaccgatttgacaaagaagtacggcgattttaccgccgtcaatcatatatcactgcgcgtcgaaaaaggagagatattcggtctgctggggccgaacggcgccggaaaatcaacaacggtgtcaatgatcagcaccgtgctctcaccgacgggcggaacaatctgcattgacggaacatcattacaggaacagcctgcggccataaaaaaagtaatgggtgtcgtcccgcaggaaatagccttatatcaagcgttaagcgcaaaggataatttggcttttttcgggagtctgtacggactttccggtaaggagctctataaacgggttgatgaagtgctggacatcatcgaattaaaggagcagcgcagccaaagggtgtctgaattttcaggcggtatgaaaagaagggtgaatatcggcgctgccctaatgaatgaaccgaaactattcattttagatgaaccgaccgtcggaattgatccgcaatccagacaccatattcttgaaaccgttaagacgttaaatcaagaaaaagggatgaccgttatctacacgagccattacatggaagaagtcgaatatctctgtgaaagagcggcgatcatggatcacggctcaatcattgcttgcgggacgaaagaggaattgaaacagtcagcaaaagcttctgataccctgattgtgaatgcagaggatctgaatgatgacgccgttcaaaaaatccgccgcattcccggtgtgtctgaggctgccgtcagccatcagaacatttctatgctcgtttctgcggcagatcggaatatccttgatattgcggatgatatcagaaaaaccggtatcaccatcaagggcattcattttgaggaagcgaatctggaaagcatcttcctccggcttaccggcaaaacgctgcgggattcataggagggcatcatgaaaacattattcaggctgattttattagattttcggttattgaccagagaaaagtctttctatataaaactgattctgtttccggcgctgatgatttttattttaggaacagtttttcacggcgattcgaaagtgaagtcatttcagatcacgttttataatgcggatcacgcggagagtcctttgggcgacgtattaaagaatgacgttctgaaacaaaatgatcttatccgtgtaaaagacataagcagttatcaagaagggaaacagcttgtcgaaagcggcaaagtctccgtttttgtatacgtgccgaaagggtttgcaaaagcggcagaaaacaatgaaaaaacaagtatcaaagtcatctcagaccaacaaggctctgtaaacggcgatattgttgaaatgatggccgattcgtttgttaccagagtaaaagcggcaaacagtgaggaaaaagcggtgctgaagcagtcgggacatctgtcaaagaaggatgtcagcagcataatcagcggcctttccagtgaacatgaacagactgtcaccataccgaaacggccggccggcaatcaagcggctccgattgatgcgatgcagtattattcaatcgcgatggtcgtcatgttctccatcatgaccgcgtttgcgcttattcacggcatagtggaagaaagacagcagcacacgttattcagaatcaaatcaatgcctgttttacatatacagtacgtggcgggcaagcttttgggaatcatgtttgccatccttgtgcaaatggctgccgtcatcatcgcaagcagcatcttgtatcaggtaaaatggggcaacttatttgagatattgctggttacgatcgtttattcttttgcgatcggcagtattgtgattctgtggggggttactgcaaaaaaccacgagaccgtctcaagcatggcggctcccattttgtatggattcagttttttaggcggaagctttatcacaaaggaaagtctgcctgacagtttgaaaatcgtgcaggagctgataccgaacgggaaagccataaacagctatgtaagtgtcacgcagcatgcaggtctgagcggtatttcggcggatttggcagagctttttgccatcggcgccgtgtttttatgtttgaccatatgggtgtttaagcggaaggaggctgtttcatgacgcagctgttattcatgatcagacatcagctgaaactgatgctgcaaaatcgggccgccatctttgcgacgatttccgttccgctccttctgacttatttcttttccttttctgcggatgacagtcagcagagggaagtatatgtggctgatgcggatcagagcgtcttttcaggacaatttatgaaaatgattcggacagccggccatgtaaaagtcacgaaggtaacggaggacgttttaaagacaaaagtcaatcatcaggatatttccttcggattgctgatcggctctcattttgaagagacattattttccggagacgaattgaatgtttcatttattcagaatgaagaaaagggtgatgctgttttgacagagcagctgattgcccagcaggcgggaaccctgaaaaaaatagtccgcgatgcaaaggtgatgtcccggacgctgcactctgacgggaagcagtcggcggctgatctgctgaaggatattcaggaccattctgccgtcacagttgaccgccatcacgtttatgcaggcggacaagcggccggcaggctcatcggttttttagtgatgtttatttggttcgttgcggtccaaagcttgcggtcatttatagatgaacaagaaaatcatacatatgcaagattgctgagtacgcccgtttcctatacggcatatgccatctctaagtttgcggcggcgtatcttttcggacttctgcatattatagtgattctcgctgcgggaaaattcatgctgcatatccgttttgccgatcacgttcttgctgcgggagcggtgcttgcggcctgctcatttgcgctcacttctgtaacgatagcagtaataccgtttatgaaaagccaaaagcaattcacatcgcttgcttccgtatttatagctgtcacgggtttattgggaggggctttcttcactttagattcggctccggattacatgcggacgctgtctttgtttacgcctgaaaaatgggcgatcggcgcgtttcaaaacaatgggggcagcagcacgcagattgcgccgctgagcctgtttcttgctgccggcgcagtgtcactggccttgtcactttatttgataaaccggaatttgaaaaaacatggttaggaggatggctgctttgtatatggcagaaataatcggaataatagaaatgctcgcgggagccgcaatgaacgtatggatcggcaagctgggaaaaacctttttcggtaaagatgacagaagttcgaggatcgtgttaagaatctgcggcatctttctcattatcaatggtgcttccagagcgtttcatatctagttcacaaagttttccggactattcacctaaatgtaatctttttccttgtaaatcatgtaaaatagtaagtgttctatgaaaatatgataaagggaggaagaaacatgaaaaagagaatcgttatgttatttgccgcggctgccgctgttttaatgctggtaagcggattgtgggccccgtcagcgtctgcggcgccggctcctgctttaacacaaatccgtattatcggagtgacctctgacggacagaattatcaatgggaaaatatcgggccaaaccaaatcagcgcatcaaaaccgatgaagggcactacgggttatttagcggtatacttccaaggatatccgaacaataacacgattcaggcgtttaacaacgggacgaatattacaaatcttacgtcaaaagcgctggaagatgaatatacgaaaaacggcaatatcattacaggctacattaaatattacagcgtccctctttcttatgtcagttcaggaacgttctctttctccgcaacggggctgaatgggccgtatacaccgttaagcagcggatttttctccattcaggtacagaattaaaacaaacacccggtgtgcagatgccgggcttttatgtatagtttttctctctttccgggaagctattcttaaagaagagggagggcttacatgatggacaggacactcgggtatttgcgcgagtcgctttcaaaccacttggagcatgacgtttgccgcgggatttataaaaagctgcaggtgaagcattatgcaaatgaaggtgagtttgtgaaagatcttaatgatctggaaatggatgcgttaaatcaggtgcttgagaaggaaatcaaatatgctgagaacgagcaggatgagaagcgcacaatggaattgaatgaagtatatgagcttctgttttaaaaagcctcccggctgacgggggcttttttttattgtttggaaacggtttacagtatcgaccgagtctttgtataatggatagttgtgacaaaaacagacggaggagaaaaatgaacgaaataaaaaaacagacggtacttgaattgtcatcggttgagaaagcattggtttttctggtgccgccattattggggctggtcatcggatggtttctgccggtcattgcgaaatgggccatttcattggattggctgccatttcaggggccgcttggaatcatcgcttcttttcacggatggaaggctgcggctgtgaccgccgttatcggtttattcggagggatccggctgacgagggctgcttttaaagaaagtcttgtggcagtcgtaacggatagagaggtgtccttaaccatacataatgaagaaagcgtgttttcaaaagacagcatttccggtgtgtttacagatcaaaagcagcttgttttattggggactgaagggcaggagctttttcgggaaacgcttgagccggccgttgaaaaagcagctgatgcatttcgcggtcatgggtatgtctggctggggacggaagatccttttaaagatgaatacaaacggtgggtgccggacatgccggatttggagccggtggcaaatgctcttttaaaagcgagacaaaaggcgctgaaacaggatgagaaggctgatgcgaaagaactgaaagctgaaatatccaaactgggcattaccgtgcgggatcaagggtcacgccaatattggcggatctataaaacgccgtctgcataaaaaaagctgcctccgttttatacggccgggcagcttggaaacagattatttcttcttgtcatcatagtattgaaccgggtacatggagccttcggataccattttgttgtcttcaatatcttcgggatgcgggttgcctgctttattgacgggaaatgattcaatatcgtgcttcccggaaagcgatgttttcatattgcggagaaagctcttcaccttttggcggtttgatttatctttaagcagataggaagtcactccgacagtcgacacggcaagtcctgaaatgagcagtttttgtttcataataaaaactcctttctatttctggcttgcagtatttattcccgcttggcggctgtttaaacatcgaaggggaattttggctttctgctttaatgcgataaagattgacaaatctattttcagaataatattataaatatatgatagtgctgaagtcatattttatgtgaaaggtgttaactttatgaatcaattacatcgcagaatgggaacgtttgcactcatgatggtcggacttgggtcgatgattggctccggctggttatttggggcatggcgggctgctcagattgcgggacctgccgccattatttcctggattattggtatgatcgttattctgtttatcgcactttcttacagtgaattgggttcaatgttcccggaagccgggggaatggttaaatacactcaatattctcatgggtcatttattggatttattgcagggtgggcaaactggattgcgattgtttccgttattccggtggaagcggtggcatctgttcaatatatgagttcatggccgtgggactgggccaaatggacaagcaatcttgttcacaacggcacacttacgggagaggggctcggctttgcatctgtattgctgattatttactttttactgaattattggacagttaacttattttcgaaggcgaattcattgactttaaaatcattattccggggctgacaatcggggctttgctgtttaccggttttcacggcggaaacttcacatcagggtcaagcattgcgccgaacggctgggcgagcgtgctgacggcggtggccacatcaggtatcgtatttgcgtttaacgggtttcaaagtccgattaacatggccggagaagcaaaaaatcccggcaaatcgattccgattgcggttgtcggttcgttattggtcgcaaccgtcatttacgtcctgctgcaaatcgcgtttatcggtgcggttgaaccttcaatgatcgttcacggctggagtcatctgaactttaactctccatttgccgatttggcgatcgcgttgaatattaactggcttgtcattatcctttatgcggatgcgttcgtatctccgtcaggaacaggtatcacctataccgctacgacgtcccgcatgatatacggcatggaaaaaaataagtatatgccgagcattttcggaaagcttcatccgctgtacggcgtgccgcgccaagcgatgatttttaatctgatcgtatcgtttatctttctgtttttattcagaggatggggtgtgcttgctgaaatcatttccgttgcgacactgatttcttatatcacgggtcctgtgaccgttatgacgctgcggcggacggcttcggatttgtaccggcctctccgtctgaaagggctcagcgtggttgctccgctcggcttcgtattcgcgtctctcgtgctgtattgggcgcgctggccgttaacggggcaggtgctgtttatcattttgatcggtcttccgatttacttctactaccaagcgaaagcgaagtggaaaggattccgccgaaactttaaaggcggcgtctggatggttgtctatctgctcagcatgatggtcatttcatggctcggaagtgaaaaattcggcggtctggacatcattccgtacggctgggatatgggactgatcgcaatcgttgcccttgttttctatacgtgggcgcttaagagcggattccaaacggagtatttgaaagacgctaaagcaatcaacgatcaattaaaaggcggacaggcggaagccgctgccggaaaagaataatgattatgcaaaccttgcggtaaacgtcccgcaaggtttttttatcgggcaaaaaacatgggttcggtatcatctccgaacccatgtggctcgatacaggttgacgatgaatgagaacaagcctaacgacagaacaatcaagaccagtattcttttttctcatatttctccgccttatcaataactgtcttccattaacttttttgtgaaaaatgacactctatcattaggcagctaattcaatacttaatactttcgatctgaaaagtatgaagccgggaaaaaatcccgttaaatagatcgacaaaatttgaaaaccaagcaaaattcacttattttgacgagtttgaaattttattgttagaattgatcatagatggtaaaaaattaaaatccactcctgtcagaggacttgaaaaaatgattaacaatgcccatgtttctgaatatgactttttatgattaagaaaaacaaagaagtatggagtgattagatacattttttaaatggctagacagcagagtgagtatacataagggaaattaaattcacaaaggagaataataatggatgagctagatcttgcttttggtattttatcactttctattatcgtcttatcgattatattcacttatattttcaaaaaggtgtatataatgccgcttgtcagtatagttgtttcagtcatattaatgttcactgtttttaatctatccttctggggatgggttgttgtctatggtttaatatcactggtattgtcatatattacaaatagtataagaaagaaaatagataatagaaataaataattatatcctttaatgcaaaccttgcggtaaacgtcccgcaaggtttttatcgggcaaaaaaacatgggttcggcattatctccgaacccatgtggcttcattatttatattcttttttgaccttttggaatatatccgcatagttggtgaacacaccggttacgccccaatccagcagacggcgcatgtccgcttcgctgtttacggtgtaagggtgcagcagcagtccgtggctgcgtatgttccggacgttttgagcgttcagcgctttgtaatccggcccgattccgacggcatatgttttgatgtccgttaaatctgcgtcagtcattgaagtcagctgttccgcttcaagcaattggacggcgggaagtttcggatcaagctttttgattttcagaaggctgtccttgctgaaagactgaatgatgacttgtccgggtttcgcatgctttcctgccaacttgtactttttcagtgaagcgatcagcttttcttccatacccggatacgtttcaggcgcctttgtttcaatataatagtttgcatgtctgccgaatcgttttaacacgtcatcaagtgtgggtacacgaagtcccgcgtattgcggttttgctttttccggataggccttattgaaccaagagccggcgtcgagcttttgaatctcggctaatgtatgatctttcacccagccgtgtccgtttgtggtgcgatccagtttttcgtcatgcatgacgatcagcttgccgtcttttgtcatttgtaaatccaattcaatatagtctgccttcattttttgcgcagtttcataagaaaggatcgtgtgctccggcacatagcccgaagcacctcgatgggcaatggtcaaaactctgtcaggagacaagagatttccttttcccgctgctgatacaggcgtgacgatgaatgacaataaaccgaatgaaagcaaaaccaaagcaaacaacttatgtttccgcatgttttcttcccccttaaaaaaatcaatatctgtctctagcgtagaagatagttgtaaatcctgtactgcaaaaatattaatcttttatgttgttttcttacgcatgctccgcccgtttgcctgtattccacgtcatcgccaagaagacgatggacagcaagcatgaggtgacaagcatgataaagcctccgttccagtcaaagcggtctacgacataacccatgatggcgttggcgaaagcggagcctccgatgtagccgaaaaacccggttaagccggctgccgttcccgccgcttttttaggagcaaggtcaatagcctgaagcccgataagcatgacaggtccatagattaagaacccgatgctgataagcgcgatattatcgacgagcggatgaccggcagggttaagccaataaaccaatacagcgataaatacaccggccatgaacagtacgcctgcaggtgcgcggcggcttttgaaaaaccggtcgctgatccagccgcacaaaatcgttcccggtattcccgcgtattcataaaggaaataagaccatctggaatcttcaggagagaatcctttcgcttccgtcaaataggtcggcgcccagtcaacaacaccgtaccgcacaaagtaaacaaacacattagcaaatgcgatataccacagaaatttattattcagcacgtatttaaaaagaatttctttggtcgtcatctctttttcctggtctttaaacgcatgtttcggatagtcattccggtattcctcaatcggcggaagcccgcatgattgcggagtgtcccgaacgagaagaacaatcacaaatgaaatgacaatggctatgatcgccggaaagaaaaacacgcttttccaagtaacaaacatagcgatgccgagtgtcacgagcggggcgagaatacctccgcctatgttatgcgcgacattccatatcgacattttcgtaccgcgttcactgatggaaaaccaatgagccatcgtccgtccgcaaggcggccagcccattccttgaaaccacccgttaataaacataaaaatgaacataatcgtcacgcttgaagtgacccatggcatggaaacaaataaaatgtttacgacacctgacaaaaacagacctgtcgcaaggaaatacctcgggttgcagcggtcagacaccatccccataataaatttgctgaagccgtaagcgattgatacggccgcaagcaccaagccaagttctccttttgaaaacccttgttcctgaagataaggaatggcgaaggcaaagtttttgcgaagcaaataatacccggcatatccgatgaaaatccctaaaaatacttgcagcctgagccgtttataggccgcatccgtctttgaatcatccaatctctcaatatgcggagccggcttgaacaattgaaacatcatatcctcccctttgctgaacgtctatcatgatgtatgtatgactcctttccttgaaaatgacaaaaagaaccagaaatcaccctcgtaaaagggcgggtttttctggctctcctcatctccatccaaaaatcattaacttgtatatgatagcgctttcttaaattatcacagtccggcgtgattgtaaacgctttaagaaaagttttcatttttttgaataaataaccgaagggaatatcagccggaacgcgaaaggatttgaagtactcgtttttgtactcaggcataagatgtgttaggccgattaaagaaaagcgaagggagtgcatctgttgattgatgaattggattttgcgttcggtgttctgccgctttgtatcatcatcttgtcagtcgccggaacgtatctgtttaaaaacgcgttcattatgccggctgccgctttggccgtttgtcttatatgcacctttaccgtgttgaattactcgtttatcgggtgggcctttgtgtatacgcttgtctctttcgcgttatcccatattacgatggtggtgatcagacaaaataaaaaataggatcggcggcagccgatccagctatcataagcagagatgaggctctgctttgttttatttatgaatgtgcaggaattccttaatgacagcggcatgttcttctttcggatacgtgctgtacagatggctggttaagcggacggggtctccgaagaagtatcgttcatattgtgtctgtctcgtgccgaaggggctcatggtcaaatcccatgccaggcggaatactttcacccgatcctcagcgttcaattcggccgcctgtaaatattggtcaaggtctcccctgatatctgaatggaacgctttttcagtcggcaaagttaccattccgcttgccccgatcagctgaatgatctccgtgaagcgcgggtagatgtcaggaaaaattgcgctgacaacacgaagcggaatgacactcggccgcatatatccccattcatctgtttccgcatcattctccgatttttccaaaagtgctttcatcgtttccagaccggtgatgatctcagccatctttgcatgaatatgctgatactcgctgacatttatcgtatcgacaatcgtctgggcaaggcccaggagaaactccgtctttacgatttgtctcgtgatgacttgatgaaatgcgaaggcgttaaaagagcttttcatattaaaatcaaaagccgcatcgtaattatcataataaaatacgcgttcccaagggactaaaacgttatcaaatacaacgatagaatccatttcttcatatcgtgagctgagcggataatcaaatgatgattttcccagtacgaaagattccctgcaaatgaattttactccctttgtattggatgggattgaaaaagcgaacgcttcatccgattcaaaatacatcttaggcagagaaacgacgagcacttcatctgtcagaccgccttgtgtggccaaaagccgggcgccgtgaatgacgaggcctttttcatttttttcgatgacttttgccgagataggggcaggtgacacgtttacacccatttgcgaacgatttacctggggggtgataaacgtgtgcgtaaaagaaagatcctgtgcaacagcgcgttcgtacagcgcctgaacatgttcaggaaaacaatgatcccggtctttcaaaatcgcggcagaagaggcgaaactcatcagcacggtattcatgtaatccgggctccgtcccatcattccatgcgtgtgcctggcccagtgctcgaacatttttcttcttctctttaagtcttcttttgttttcggctgcaggtatgaaagcccggcccgttcttttttgccgggaagactgtaagtcatctggtcttttaatcccggtttcgtctgcaaatcataaagagagcgcttcgtttccagaaggcccttaaatgcaggatgttcagaaatgtgtccctcgatcttttcaccgtcaagccaaatctcattctcaagccggtttaatcggtcaataaacattttgccattaatgatacccatcatgtcgcccttctttctttacagatccactacctcattatattgaaaacgaaatggggtgttccggttatttccaaaggggaagagcctttttcggctagggaggctgaaatgattgcataataaaaaccccttacgcagagggggtttttaactgatcatgtctttgtatctttgttcgaggacgaagtctatcattccggtgatacgggtgttttcagcgttttttgtaaagtgaggaattgagtgcaaaggtccttttttgtacagtttcagcagttttgtaagatacattaagcctctggcgaataaaaaaagcaggagatacggaaagaggcggggaacatgaacatagctgacttgacctgagaaaagtgctgtcagaaacatggcaataatgcttccgataaaaatccatttcataaaatcaaataatgagaagtcaggtttggaaaactgtttttttcagcttgaataacttctcggtatcctgttcttcaagacaattcatcatgtttacaagacctagtctgcttcatgcttatcatcacttttttcccgcttcttttgattcatttaaagatgttccgatataaaaaaggcgtgccgcggtgtaaaatggctatattgataaatatggaggttgagatggatcaagattatatgactgagcttgtctcggtccagctgaagaaaatccggtcggagagaggctatacacaagaaaaaatggcggatgtgatcggcctttctaaaaaggcgctggtgcagattgagaaagggcgggcgctcgcggaatggccgcatgttgtagcggtttgcgcgcttttcagatcaagtgaaacactgcaatccgtattaggagatgatccgctggaggtcattgaagcggttgctcaccgaaccattgacaggccgaaggggaagacgatgggcggcagggtgtggtggaaagccatcgagaaaaaaggcgagttccgcttgcagcagcatttgatttcccaccattaccgcatcctcgattcttatgatgatttgtggttcagcagttttgaaaaggcggatgctttagagcggcttgatgagctgtttttggaggcggaggaagcgaagcgctgacgcacctccggttgatgtattttctgacaagtgggaaaatacatataaatcccaaccaaaggagagattcgaatgaagcctgaagatatcgtgcgaagcggcccgaatcagtacatatgcaaggaagggatcgcaaaagaacttcccgggctgtcggaggtattcagaaaacccgttattgtgaccggaatcaagtcctatcaggcgtttgccgattacagcgggggttcttcctgggatgtgattcagcataaaggatactgttcacctgaggcggtgcgtaaggtctgtgagcaggcgaaaggtgcggatgtgatcatcggtatcggaggcggcacgattttggatttggcaaaagcggcggcagaccggcttgatattgaggctgtgatggttccttccattgcgggtacgtgtgcggcaagtacaccgttaagtgtcatgtatgatgagagcggcaattttatcagagtggattatcataagcgttccagctatttgacgcttgttgatccgctgtttttgctttcctctcccattgaatatatgaaaagcgggatcggtgatacgctggcgaaatggtatgaggctgaggcggtcatcagaaatacggaggcgccgccgctgatggctcaggcggggctgagacaggcggaatatattcgcgatctgttattgcgttacagtgaagcagccgtcgaaagcatggagaaaggcaggctgtcattgccgttcatccatacggcggaaacgatcattatgcttgcgggaacggtcggcgggtatggaggccgtttgtgcaggatggcaggggcgcatgcggtgcacaacgggctcagttttcttcaggagacacatcaggtgctgcacggccagaaggttgcttacggcatattggtgcagctcgcgcttgagaatcggagtcatgagattgaagagctgcttccgttttaccgccggctcggatttcccgtcagtctctttgatctcggcatccgtgacagccgtgaggaagccaagcgacgcatcgcttctcacgcctgccgggcggaagaatcattatgcttaatggggcaatatggcgagaaggacgtgtcagcggcgattgaatcgctcgaatcagcgcaaaagacaggatagagcttatgatctatcttgtctttattttttgaatatttccgttataatgagtggggtatagaaagggaggggccaaaaggacatgtatcaggcgaagaagatattgttattaggatcaggcgagctggggaaagaagtcgtcattgaagcgcagcggctcggggttgtcactgtagccgttgacagctatgagcatgcccctgccatgcaggccgcgcacaaaagctatgtgattgatatgcttgataaagcgcaggtcagagaagtgattgaaaaagaaaaaccagacttgatcgtgccggaagtggaggcgattgcgacggatgaactgctgaagcttgaagaagaaggctttcacgtcattccgaatgcgcgtgcggcaaagctgacgatggaccgtgaaggcatcagacggcttgcggcagagacgctgcatcttccgactgccggctatgaattcgcgaatacatatgaagaatgtaaagaagcggcggaaacaatcggctttccgtgtgtggtaaagccgctgatgagctcttccggaaaagggcaaagcgtgtgccgctcggcttccgaactaaaaagctgctgggacatggcgatggaaggcggacgggtgaaaaacggccgggtcatcgtcgaggaattcattccgtttgaatcggaaatcactcttttgacagtgcgtgcggcgaacggtacgtccttttgcgcgccgatcggccatgaacaaaaagacggcgactatatggaatcgtggcagcctcatcatatgacggaacagcaggttgaagaggcgaaacacattgcgaaaagcataacggatgagctcggcggatacggtttgttcggggtggaacttttccttactcaagataaagtgtatttcagcgaggtgtctcctcgtccgcatgatacggggctcgttacgcttgtgacgcagaatttgtcagagtttgcgctgcatgtccgcgcgatattgggatttccgattccggaaatcacccagctgtcgccgggggcaagccgtccgctgaaggcatcaaaagagcttgccgattatgcggttgaaggtttggagaaggctttggcggttaaaagcactcaagtccgcgtattcggaaaacccgtcacaaaaaacggtcgccgtatggcggttgcgctttctgcagccgagacggttgaagaggcgagagaaagagcggccgaagcactcagtcatttatcagtcacataactatatcttaagaggcgtttttaccgtaatggtaaggcgccttttttgtttggacagactatatactggaaaacggggttgtgagataatgtatgaggccgttttgtgccggctttataattcatgaaactttttatgtccgcaatcgttatatgtaatgttctcatttaacagaggagaaaataacaatacaccatatggtctttcatctgtgaagaacggacaatccgcatcgcggcatggaataaattaagcagggtaatccggaatagagataacgccgattgcttaccttaatatgaacggcgaaaaaacaaaaatcaccagattagattgttcaaataacaccaaatgctgtataataaaagaatttgaatgatagcattgaaggaatttcattttatgtttccttaaaatggagtctttatgcatacgcagtccgatttgatatggttttaattggaggtttgtgtaaactgtgaattatatacctagtatgattacaattggaaattttatttgcgggcttctatcgattcattcccttttgtatcataatattcactctgcggtgatttttattttcaccgggatgtttcttgatttctttgacggtttggccgcccgtaagctgaacgcggtatcggagatgggaagggagcttgactcttttgctgatctcgtgacgttcggcgtggcgccgtctatgctcgcttacactgtttcactatatacgcttccgttcatcggaattttaatcgcgctttcctacagcatttgcgggatgatccggctttcgagatttaatatcgaacaaagcaagctgccgacgtttatcgggatgccgattccttttgcgggcatgtgtcttgtcattttgagcttcatcaataacgcttttcttctgggagcgggaacgattgcgctcggatatttaatggtcagcaacattaaatttccccactttaaaaaacaggcgcctgaaaacctggagagcagaagatggaactagttcagcaattaatttccgattacggatatatcgcgatttttctcatgctgacacttggtattatcggattgcctattccggatgaagtcatgatgacgctagtgggctacttcacgcatttaaaagtgctcaattatgagctctccattcttatcagctttatcggagcgcttctggggatgatcatcagctacttcatcggcagaaaagccggccggccctttattaataagttcgggaaatgggtcggcctgaaggaaaagaggatggagaaagtagacaggtggatgaaaaagtacgggccgtacaccattattttaggttatttcatccccggcatcagacacgtgacatgctacttttccggaatcggcagaatggatttcaaaacctacctatgcttcgccgccatcggagcgtttttatggtgttttatttttattactataggaaaattcataggagtaatcaatgtttaatactgccgctaaagttctttatcgttcattgattgaactgactaataatcgattgacgtcttatctcattaaaaacttctgtgaatcgaaactgagcaagccgatgattccgctgttttccaaacactatcgcatcaactggaatgaaacggaacgcacagcttctgactttgattcactggcgtcatttttcattcgtgatattaatttgaatctccgccccgtggcaaaagagaagaacgccattgtcagtccggtggacggcgtcgttcaaacggtgggcatgattaacccgaatcaaaccttcatggtaaaagggaaagattattcgttcgccgaactgacggggtttaaaagcgccgatcacaaatacaacggcggctattttgccgtgctttacctgagtccgagacattatcaccgcttccattcccccgtcagctgcacgtatcagaagctggccgagcttgggaaacgctcctatcccgttaatacgatggggctgaagtacggaaaagatgtcctctcaaaaaattaccgctatgtgtacgagctgacccgagctgaccagcagatgctcatgattccggtaggcgcgatgaatattaactccatcgttcagaccagcaccggaaacaagcttgaaacgggtgaagagctgggctatttttcatttggatcgaccgttattttagtattcgagaaagatatgtttaccccttcggataacctgacagaaggccgcgaattacaggtcggccagatcatcggttatgcggagtcacaggaggaggcgtccgctttataaaagctgctcctcttttttatatggtgtaaggaagtgacaatatggcagaaaaggatttggcaaagctgatagagcagtaccagcatacgggcggccagcaagttcttgaagccgtgcgggacgcctgctggcctgtcgtcgaagcgctcatatcagagctggctgaagacagcgccgatgtcctgcgggaaaaaggccgtgaccgttttccgtttattatcggcaagtaccagaccgctgcgggcctgccgcttgagacctttttgcgcaatacgtatcggttttattttcagcaggtgttaaaaggcgaggcatgactggaagaaagagtccggacggaaatgttcatctttcgcccgttttcctgtatgatatagtagagtgtgcgtgatcattaatataattgaacagggtgtataatcatggaaaaacaatatagagttttactttattataaatatgtaaagattgatgagcctgaagaattcacggctcagcatttgaagttttgtaaggagctcggtctgttaggccgtattttgatttctgaggaaggcattaacggtacggtgtccggaacggttgaacagacggatcaatacatgaaggcgctgaaagctgatccgcgctttgccgatatgccgatcaaaattgatgaggctgacggacacgcgttccgcaaaatatttgtccgccataaaaaagagcttgtgacgcttcgcctcgaagatgatgttgatccgaatgtcacaacgggcaagcatttaaaaccgaaagaattttatgagaaaatgcaggaccctgacacgatcgtaatcgacgccagaaacgactatgagtatgacctcggtcatttccgcggagcagtcagacctgatattgaggcgttccgtgagctgccgagctggattgaagaacacaaagacatgcttgaaggcaaaaaaatcctcacgtactgcacaggcggcgtacgctgtgaaaaattttccggatggctgttgaagcagggctttgaagatgtatcccagcttgacggcggtatcgtcacttacgggaaagaccctgaagtgcaaggaaaactgtgggacggacagtgctacgtgtttgacgaaagaatcagcgtaccggtcaaccgtgtagagcatgttattatcggaaaagattatttcacaggcgagccatgcgagcgttatgtgaactgtgcgaatccggcatgtaataaaaaaatgatctgcacacctgaaaatgaatacaaatacatgcgcagctgcagtcacgaatgccgaacaaacgaacgcaacatgtatgtgaaagagcacgaaatgacccaggaagaaatcaatgaacgcctcgctctgattgaaaaagaagatcatgcggcgattgattaacagaaaagaccaccaatgaggtggtctttttttgtgtttacatactttctgttcggacgctctggtctgaagcggcggcgggtcctttataattgaaggctttttcccatttggatacgacgatgcaggcgaccgcatggcccggcacgttgacaccggttcgcgccatgtccatgacgcggtcgacaccggcaatgatggcgacgccttccgcggggagaccgacggcattcgcggtcgccagaagcacgacgagtgaccctgacggcacggcggcaatgcctttgcttgtcatcacgagcacaagcatcatcagaagctgctgagatagcggcatctccacatgaaaagcctgcgccagaaaaatacatgacaccgataaatagaggcttgagccgtcacagttcagcgataaacctgacggaaccacaaaggagacgacccgcttcgggcagccgtatttctccatccgatccatcagctgaggcagaatggtttctgtgcttgtcgtggaaaatgcgatcaaaaacagatcccagatcattttcagcacttcaaagtatttgattttaaagataagccccacaatcggaaacagaacgaaaaggatcaaaaacagcccgagaaatacagtgccgatcagcttcagcatcggaagcaaaagcgcgattccgaattgtccgacggaggcggccataagggcgagaacgccgatcggagcggtgaccatcaccatttgcgtcagcttgaacataatatttgccgttgattcaaagaaattcatgacaggtgcggatgctttgccgatgccggctgccgcgacaccgaataagattgcgaaaaagatgacggcgagtaggtcatttttcgccataacgtcaatgatgttaacggggataatatcaagaagcatttgtttcaggtcgactactttttctgtatagccggaaagctcgtgaatatcttttttagcaaggtgagagaggttaaggccgactccgggcttcagtacgtttgccaataacaggccgagccccagaacaagcgtcgtaatgacttcgaaccaaataatcgttttgatgccgagacttcccatctttttcatactgccgctgccggcggctccgataacaatggtcgaaaacacgatcggcacgacaatcattttaatcaggcggataaatccgtctccgacgggccgcagcgccatcccgaaatccgggaagaaatggccgatcaatgctccgatggctaaagcgatcaaaatctggaatgcgataaattttttcaagcgaatcccccttttacttgcgcatttcttacgtaattcgtgaagcaggcggcaaccaccttcctctctgccataaatttgtcacacattgactgtgtgaaagagaggattgctttacattatgtaagcgcaatcattgaatatgacacaaagtcctcattggaaaaaatgaagcggcataggataaagaaagaattttactcgaaaatattaaaaattttgataattatatgatatgatacggacaactgcatcctcatatatctgtgcatacacgattcggacagagaaaatatatgcagatcataaaagactgaaaattttaacaattataagaaaggtgtgcttttgttgaatcaactgattgaaatacgtaaggtcacagcaagaaaagaaaaaccggattccgcttcattgggatttggcaagtacttcactgattacatgtttgtcatggattacgaagaagaaagaggctggcatgatccgagaattacaccttatgaaccggttcatcttgatccgtccgcatccgttttccattacgggcaagccgtatttgaggggctgaaagcttacaggtcagaagaaggacgggtattgatgttccggcctgaccagaatgttaaacggctgaataaatcgttacggcggatgagcatgccgcctctcgacgagaagctggcgctggaagcattgatacaattggtggagcttgagcaggaatggattccgaaagaaaaaggaacgtcattatacatccgtccgtttgtgattgcgactgagccttctttaggagtccggccttcaaaccgttacaaattcatggttgtcctgacgcctgtcggttcgtattacggcgatcagctgaaaccgatccgtatttatgtagaggatgagtatgtgcgtgccgtcaccggcggagtgggcgatgtcaaaacgtccggaaattatgcggccagcttacaggctcagcaaaaagccgaagaactgggatatgatcaggtgctttggctggacggggtggaaaagaaatatgtcgaagaagtaggcagtatgaatatctttttcatcataaacggagaggctgtaacgccggcattaaacggaagcattctcggaggcatcacccgggcatctgtgatagagctgttaaaaagctggggcatacctgtcagggaagaacacgttgccattgatgacatttatcaggccgcaatgagaggcgaagtgtcagaggtattcggtacgggaaccgcagccgtcatctcgccggtcggcgcgctgcatattcacggagaaacgattgaactgaataatggtttgatcggtgaagtgtcagaaaggctctatgaaacgattaccggcatccaggtcgggaaggtgcgggattcgttcagatgggtggttgaagtataaatgtaaaaagaacccttgcgcggcagggttcttttttcggttattgggatttagcggcttgaacgcgggcggggcttttccggtttctcacataataagcgatgtaacagacggccataaatgcaattccgcaataaagggcgatggcctggttcggatcaaaagcaatgccgatacaggaggcgaggcacaggagaaaggccgctatcggcacggccgggtatcccggcgtccgatacttcagctctgaaacctgatgcccttctttaagaaaccgtcttctgaacaaaaattgcgatgcggcaatgctcatccacaccgccacgaccgcaaatcctgagacggagacgagaacaagatagattgtatccgctgcaaatacgcttgacagcagcgacagaatgccgccgatcatactgaagatcagagcgttaaaaggaatgcctttaggcgtcagcctggcaaaggcaggatgaagctctccctctttagacagggaccacagcatacgtgatgacgcgtacagccctgaattggcggcagacagaagcgccgttaaaatgacgaaattcatcagatcggccgcatagggcacgccgactctgtcaaataccgtgacgaacgggctttcaatcacaccggcttcctggatggagatcatgcccgacagcacaaaaatcgttccgataaagaaaagcgccagccgccagactgtggtcttaatggcgcgcggaacggttttttccggatcagcgctttccccggcggcgattccgatcaattccgtccctgaaaaggcaaagtttactgaaagcatcgtcatcagtatcgggaaaaagccatttggaaaaaggctgccgctaaccgtaaagttcgacagcataggtgcggcttcaccgcttttcatcgggacgatgccgaacatcgccgctcctcccaataaaataaacagtaagatggctaagactttaatgcttgagaaccaaaactccgattcagcaaaaaatttcacggagaagacgtttaataaaaagatgaaaagagcaaataccgcactccacatccacaccgaagtatgcgggaaccagcgctgcatgaagagcccggccgccgtgaattcagagcccagcgccaccgcccacgtcagccagtacagccatgcgaccgtaaagcccgtcgccggtccgatgtaggttttcgcataggtgtggaatgcgcccgtcaccggcatggccactgacagttcaccgaggcaaagcatgacgagatagacgatgcacgcgcccaaaaggtaagcgaaaatggtgcccgccggacccgcctgatgaatggtatacccagagcttaaaaacagccccgttccgatcacacctccgagtgagagcataaagaggtgtctgcttttcatacttctctgaaaatttgtctcgttcttgttgttcattgttttccaactttctgcgagggccgttctaataaaaaatctcatgccggcgaacggcacgagattccggcgaaccggctttttgaatagaatatacaaactattccgattagtcaagttgtttttaaagtcttggcccaatcggcaatggcctggatgtccgcaggtttcgtccggcagcagccgccgatcaggctcacgccgttttcgtaccagctttgcgcgctttttccgaaatggttttcacacgctgtgcctatccaggtttttgtcaccgggtcatattgttcgccggagttcggataggcgataatcggtttagacgctgcccgtttgatttcttctatcagcggcggaatatgttcaatcggtgtgcagttgatgccgatcgctgcgatttggctgcaggagtcgagcagagccgcgcattcggaaataggcgtgccctcgctgatatgccgtccgtctttggcgctgaagctgatccatgcataggtgccggggaattcctccagcagctttgtgatcgcttttgcttctgacaggcacggaatggtctcacaggccaaaagatcggcgccggattcgatgagggctttcatccgggggcggtgaaagctgatcagctcatcctccgtcagtccgtaatgtccgcgatattcagagccgtcggcaaggctcgcgccgtaaggtccgatagaagcggcgatcaaaggtttgggacggtgtatacggttttcttcatgcgcccaaaattcatcacgtgcttggacggcgagctcaactgatgtctgaataaggcggatcgcatcggtttctgggatgccgcgtgccgcaaatccttcaattgtcgattgatagctggcagtgatcgcgcaatcagcacctgcggcaaaatattctgcatgcacttgtttaatcagttcgggtctctccaaaagaattttggccgaccacagatcgtcatttaaatcacagcccatccgttcaagctcggtagccatcgctccgtctatgatcataaccggatattcatctaatatttgtgtaatgggattcataggcattcctctctgacttttctgaaaatatataaaaagagtaatagacgcttttctctttgtcaatgaaccggcagaaaaaaggtgttcaggacagctgcccgaacaccttttgtttaggaaatgtgtttgcctttcgcatttttagcgatatctgaatactcccagcattcgatcccgtcatcatcagggagcacatctctgtaaaagacggggtcctttccggctttcttttgccggacataatcgctcaaagcggcaaacgcttttttcgacagaaggaaaatcgcgattaaattcacgaccaccattaagcccatgaacaagtcagccatatcccacacaagctggactttggaaatgcatccgaacagaaccattccaagcacacagatgcggtaaatgaacagccattttttgttctggcttaaaaatccgatattggtttctccgtaataatagttgcccatcagagcgctgaagccgaacaaaagcattaagacggctaggaaacctgatgcccacgcgccgacatggtcgctcaaggcagcctgagaaagcgcgatgccgctcaggcccggctggtgataagcgtctgaaaataaaatgataagtgccgtgcttgtacagatgacaagcgtatccgtcaggacgccgaatgcctgaatgagtccctgtttcaccgggtggctcgttgtagctgtcgccgccgcgttcggggcgcttcccattcccgcttcatttgagaaaatcccgcgtctcacaccttgcatcaatgccgcacctaaagcgccgcccgctgcctgatcaataccgaaagcattttttacgataatcgacagaacgctaggcaattgggtgatgttcgtcagaatgacaaagaaagcgatgccgatatataaaacggctaagacgactacgacatattccgccatcttcgcaattcgtttgacgcctccgaaaataacacaggcgaagaccgctattaaaatgaggcccaatgtaagccggcttgtgccgaacgcgttttgaaaggcgatgctgatcgtattagactgaacggaattaaagacgatcccgaatgacagtgtgattaatacggcgaacagcgcgcccatccagcgttttttcaggcctttttccatgtaataggccgggccgccgcggaagccgttttgatcttttactttataaatttgggcaagcgtgctttcaacaaagcttgaagccgaaccgatgactgcgataatccacatccagaaaatagcacccggaccgccgagtgcgatcgcaatcgcgattccggtaatatttccggttccgacacgcgccgccatactgatgcaaaatgcctgaaatggggaaatgctgttttttgaccgggcggccgcgccttcttttaaaacccggatcatttccctcagcatgcggacttgcagaccctttgatctgaacgtgaaaaacagtcccagagaaagaagcagtacgattaaaagttttgaccataaaaaatcatttgctgaaccgattacattttcaaggaattcctgcatccaatcacctcttggttcgtttgattaaaaaatactgagctcccactcctgtgcgatatgtttcagcagcatgccgcccgtcaggctgttgccgtattcatcaatggccggaccataaatgccgatgccgcagccgttatgaaaaggctgttctcttctggcgcttggaggaaccaatgccataatgccgccggatactccgctttttgccgggacaccgacgaaagccgcatacttgcctgacgcattgtacatgccgcacgtcagcatcagggctttggcgagtttcgcgacatcttttggaatgacctgttcccggcggatcggatggtagccgtcatgcgcaagaatcaatccgattaaagcgatgtcctcggttgtaccctccatggcgcactgctttaagtagacttccagcgtttcttccacatccgcttcaagaaagttcgtttcttttaaatagtaggcgagcgccctgttccggtgcgcggtctgccattcagaacggaagacctcctcgtgaatgtgaggccgttttcctatcaatttttcaaaaacggaaaacaggtattctaatttatcatgcgccgtttcacccggaagaagtgaggcgacggtaatggcgcccgcattgatcatcgggttgaacggcttgccgggtttatggatttcaagccggatgatagaattaaacgcgtcacctgtcggctccacgtccacgcgatccagcacgtaagcaatgcctctgctcatgcaggccgcaataaagctgatgactttggagatgctctgcaatgtaaacgggacattccattcaccggcatgaatcacggagccatcaggctctaatatgcaaatgcccagctgagagtcgttgatttctccgagggcgggtatataatttgcgctttttccattaacggaaaacgggcggtaatgctcgacccaatcttgtaaaagtgaagccagttcctctttttcaaggcgctctctgaccatatctttcataacattcctcctctattgcaagcctgtccgcaagcggaaatcggtcttggaaaacgttttcaaatatagtgtgttcaattttaatgtataatgacatctacagaatcatacaaaatacgacaaaatcattcttaaaataagccgatagatttataaatcagcccgagcgtcccgctaaccgggtctaaagaaatttgcggactccttcggtcttattcaaaatagatagaagaaggaagtgattgtgatcaggctcgaatatttactaaaaaaagacggctatcttttcgcccttatgctgatcaccgtgccgctggcgggggaactgaaattttaccccgtaaatgaggtgtaccggatcagcttcggcgcgcccgcttttttcttttttctgcttctgctgcggcatgtgccggcggtattgtcagggctgttgacaggtgcagccgttgtggcattccggatcggcctggcttgctggggaggagagcatgccggctttacggaggcttttttcagccaataccccagtttctttttttactttacatatgcctgtttgttttacgtgctgaaagtcagacattttcgcgatcggccgctgatgatcggattcctcggttttctcattgaaatcgcgtctgacacggttgaaatggcggtgcagttttccggaggccagccgattatgataccggacaagctggcagatattgcggttatcgcagtttctcacacatttattgttctgagttttttcaacgtgatgaagctgcatgaagctcaggtcagggaaaagcaaacgagaaagcagcatgagcatatgctgatgatcgtgtctaacttgtatgaagaaacgattcatttgaaaaaaacgctgaaaacgacggaacatgtgacgaaggaatcctatcagctgtatcgggaaatgagcgggaacgaccgggagctcggcagccgcatgctgcgccttgcgggagaaattcatgaagtgaaaaaagacaatcagcggatattcgccggactgtcgaagctgatttcaaatgagagattccgggattacatggatgccgccgccctgatcggcctcgtcatccgaatcaatgaaaaatacgccgaatctttaggcaaggacattcagtttcaaagcgtgattgaaggagagcatcccgattaccatgtctttaccgtcctgtcgatcttgaataatcttaccgccaatgccgtggaggccatgggagacaggggtgagatccgccttacgctgcgcagggcggaggatgatacggcggaatttcaggcggaagatgacggtcccggcattccggaaaaaatcggagagatcgtctatgatccggggtttacgtccaaatatgatgaattcggcaccccttcaacgggcatcgggctttcttacgtgaaggaaatcgtaactgaacttgacggggacatctcctttcataacaagccaaaaggcgtcatatttacgattcagctgccggtgaggcatttgattgcagaaagggggagttcataatgcgcttttttatagctgatgatgaccgggcgatccgttctattttgagacagattatcgaggatgaggatttaggcgaagtcgtcggtgaggcggaggacgggagtcagattgaagggcattatctccattttaaacaagtcgacattttattaatagatcttctgatgccggggcgggacgggattgagacgatccggcatctgcagaattcgtacaccggaaaaacggtgatgatatcgcaggtggaggcgaaggaaatggtgggggaagcctattctctcggtattgaatattttatccacaaaccgatcaacaaaattgagatcatcaccgtcctccgaaaagtgaaagaccttatagaattggaaacgtccatcggcgacatccaaaattcgttaagacggcttgttcaccgcaatgaaccgcagcaaagccgccttcctgaagctcatgaaaaatccgttaaagagacggggaaatttctgttatcagaattagggattgtgggagaaagcggcgctcacgatctgatggccgtgctgcattttttatttgaggatgagcaagcgcaaaaaagcgttccgtcgctgaagcgggtgtttacaaatgtcgcgctgcggaaactggggcccgcggcgtcggaggcagacgtcagcagggagaccaaagcctccgaacagcggatcagaagagcaatcattcattcgttaaaccacttcgcttctctgggcacgacggatttttcaaatcccaaatttgaatactacgcttcgaaattcttcgatttccctgccgtcagcaagagaatgaaagaaatgcaggccaaagaaaccattccgctttctccggttaaagtgaatatgaaaaaattcattcacgtcttctttttggaggcgaaagatttacgcgaaggatcgaaatttgtcagcgggggaagccggtaacctgaacaatagagtttacttatataaggtctttgtgtaaaataatgttaactcaaaaaagaacggaggggtcctgatggcaaatcatattccggtttacgcactaatgaaatagtgtcaatgtctctgccttgagcgcggagaaaaccgggattgtctgcctgaataaaggaacctgacagttatagtgagggggcggcgattatgccgccctctttttggcgtcttcacatatctcatttttctcctcctcaggcgaagctctgtgtcagtaaataagggaaatggggaaacaaaatgacaaaacaaagggatatagaatccgttctgaacatcgcaaaggaaaatggcttacagttaaaatatgaaggggcagacataaatgaaacgggtatggacttccaagtcgtatttgctgaagatgacagcggcgtaacatgggtgctccgaaaaccgcgccgccccgatgttattgaaagagcggctgtggaaagtaacgttctcgcgtttctccgcagctatgccgcggtatcagtgcccgattggcggattcatacaccggaactgatcgcttatccgaaactgtgcgggatacccgccgccgcaattgatctggataagaaacagtacgtctggaatatggaacacgagccgccttcagacggttttgtcggctcgcttgccgcagcattagccgagctgcacggggcagatcctgccgctgcctccagagccggcattgaaatcataaaaccggatgatgtcaggcaaaggacagcggaatcgatggatcatataaaaaaagaaatcggagtttcagagccgctttggcaaagatggcaaacatggataaatgacagctcgtattggcctgatttttccgcgcagatccatggcgacttgcaccctccgcatatattaatcggcccaaatcagcgtgtgacgggtcttctcgattggacggaggcgaaggttgccgatccggccaaggattttgtcctttatcaagtgatattaggagaaaaagaaacgaaacgcctgattaagagctaccaagctgaaggcgggcgtgtctggccgaaaatgcaggagcatgtgacagaatggcaggctgcttatcctgtggagacagcgaagttcgcgcttcagacggggcaggaagaacatatgcaaatggcgcgggaaatgctcggcctgtctgattcgaaaggttattgacttccgccggatgacagcgtatgatactttttaaaacaaaagaacggatgaacaatgctgaggaagagtaagtacgcatctgcgcgcggggttcagagagtcggtggccgctgtgaaccgatccccgtccgatgccgaatgggcttctgaattgctgcgcttaaatgaaagtaggcggtgccgggattctttccccgttatcaagaaaggagtattgaaaccgtgttggttctgtactttttgagagaatggcttttcagccgttaataaaggtggcaccgcgaaaacctcgtcctttgatggatggggtttttttgtatcgttaaggaggtgatggccatggaaagtgactggagacggaccgaaaatcaaaaaaggagggatattcatggtgatcgcaaccgacgatcttgaactcacttgtccgcattgtgaaggaaccggcgcggagaaagaaggagcgccctgcccgaagtgcggagcgaagggcgtcattttgacggctcagggaaacacgctgctgcattttattaaaaagcatattgatcagtgaaatcaaacgaaaaaggccgtatccggccttcaggctgtcgagaacatctcgacagcctttattttcccttaaaatatcagacggtgtctttctcatgttccacacaagaaacgcttctcaaaacacagccgaattcgttctgcttggccaacttgtcgaagaggaccacctgcttcgaaaaattgataaatacatagacttctcattcatcgttgaaaaggccaaaccttactacagcgaaaataaaggccgcccctcacttgatccgctgatcttattcaaaatgatgctgaagattgccgcatacctgccaagcaaggccaggcgtgtgggagtgctttttctgcgcctgaaaaagaaacaggacaaaacataaaagcttgtagaaaaacatcattttctatacaagctgctttttcattcttcaaaataaggattcacatgaatgagcacttcttcaacatctgaaaagtgtcttttgatgtcatttcggatttcgcgggcaatatcgtgtccctgcttaatcgtcaaatcatgatccaaagataaccggacatcaagcaatttatagtggccgtgttctctcgctcggattttatcgagccgtttgacttgaggacaatgcaaaataaccgctttatattcctctatcagttcgggatcaacacttttttccatgagaacgtcaacagacggcctgattaattccattgaaatcttaaaaatgaggtacgccacgatgacactggcaattgcatcggcgtacaacagataggaccatccgcgtgtgttcccgataatcgccaataggacgccgataaaagcggcaagagaggcaacgatatcgcctttatgatcgtatgcaatcgctataatcgctttactgttccatgtttccccttgtttgatcgaataacgatataagatctgcttagccgcgtaggatatcagagccgcaaacaatgcgctgtattgcgggatgcttggaccttcaacaaaggacgaaatcgcttctattagaatatacacggaaacgagcactaatatgattcctacaatcgcttcgctgatgacctcagctttgccatgcccgaaaggatggtcttgatcgggcggcttattagaaatgccgatgacggccaggacagcaatcgaagccacgacatccgctgcagaatgtataccgtcggcaaaaactgcttcactatcgcctatcagtccaaaaaagatctttcctgccattaagatcagattggctatcaatgcaatcaaagcaacttttttgcttatttgttctctttcacttgccattttttcctcctataaaactgcacaaaaaaataggggcgcttttgatgcgctctccgtatcctttcttgtgtaatcactttgctcatcataccaattcagtttcgagtgggtctatagcaaggttgtttcctgtttactaataaataaggtgacagaaaaaaagttggagcagggctaaacagtacacatacaaaattgcgctgaattttaaaagtgaactattgacatttgagtatttatcttttattattatctcgaattcaagatattttaattcaaggtaatttaattagagtgcaggataagaacctgccgatcgtttgaatcacgaaaagatcagtgaagagaacgtttcgttttttgatcatatgctatttgattttttataccataatatctcgaattcgagataaagggggtacgagggaaatggctgaatttgtacagctagtgaatgaaagaagatctgcaagcaactttcttccagatcatccaatcacaagagatgaactcaacgaaatgttcgaattggttgcgttggctccatcagcttttaatttgcagcatacaaaatatgtgacggttcttgacccggatgtgaaagaaaagctgaagcaggccgcaaacggacaatataaagtgtttagctcatcagcggtgcttttagttttagggaataagcaggcatatcagaaagcggctgacatctatgaaggattgaagatgctggggatattaaataaacaagagtatgatcacatggttcaagacaccgtttcgttttatgaaaacaggggagagccatttaagagagatgaggcgataagaaatgcttcactttctgcgatgatgtttatgctgagtgctaaggaaaaaggctgggacacctgtccgatgatagggtttgatactgaagccgtgaaacagattttgaatatagatgatcaatttgagattgtcatgatgattacaatcgggaaagaaaaaacagaaagcagaaggccgcgcggctaccgaaagcctgtgaatgagtttgtggagtatatttaaatacttgtaagggagcggataaaaatggctaaaaaaacgatgggaatacatcatattacagcaattgtcggtcaccctcaagagaatgctgatttctacgctggagtgctggggctgcgattggtcaagcaaacggtcaattttgatgatccgggtacgtatcacctttattttggggatgaaggcgggaagccgggaacaatcatcacattctttccgtgggcggacgcccgtcaaggcatcattggagacggacaggttggcgtgacatcttacgtcgtgccaagaggtgctatgtcattttgggaaaagagacttgaaaagttcaacgtgccatacacaaaaatcgagcgttttggagaacaatatatagaatttgatgacccgcatggcctgcatttagaaatcgtggaaagagaagcaggggaggccaatacgtggactttcggagatgtaaccccggatgttgccattaaaggctttggcggtgcaaccctgttatcagcacagcctgaaaaaacaggtgaattgcttgaaaacatcatggggcttgagcgagtcggcaaagaaggagacttcgttcgttatcgttctgccggtgatatcggaaatgtgattgatcttaaattaacgcctatcggccgcggacaaatgggtgtcggcacggtccatcacatcgcttggcgggctcaggatgacgaagatcaattagaatggcaaagattgattgctacgcacggatatggtgtgactcctgttcaggatagaaactattttaatgcggtttacttcagagaacatggggaaatcttatttgagatcgcaactgatccgccgggctttgcccatgatgagtcacaagaaacaatgggcggtaaattgatgctccctgagcagtatgaaccgcatcgggctcatattgaacaagggctgctgccgtttgaagtgagagaattagattgatttatagatgaacgtgaagcatgaagaaaaataaaagacatacatttaacagatgtttgctggaagtgactgttggtaaacaagctgccttgcagcacatcatataatatgaaaaataaggagagataaaaatggaagatgcaggattgttgtttattcgaatcatgattggtgtggtgtttctgttttatggatcacaaaaattatttggctggtttggcggatacgggattaaaggaaccggacaatggttcgagtcaattggagttaaaccaggcaatgcagcggccgctttatcaggtctcggggaactcgcaagcggaattttatttattttaggtgtattcctcccgcttggagctgctatcataacgatcattatgttaggtgccattgtaaaagttcatggagcgaaagggtttgcgaacggtgccggcggttttgaatataacttggtgctgattgtagtctccatcggagttgcactcatcggttcaggggcgtacgctgtgcatttttaatataagtatctaagaacagttactgaaaagcggtaactgttcttttattttggaattttaagcattatttgcgggtgctctgcaaagcaaaaaaacggatatgttcaatataaatgtgtatagtgaatgtacgagtattgatgagcttggtcatgaaagacgagccgatttgaaggagggttttgatgaaagagctgacagacttacattcattagattctatcgagaattttattaaacagcatcaattcagttttatctacatttcaaggcccgcctgtacagtatgtcacgctgttctgccgcagctcagaaaagtattggatcagtttccaaatatcaaattggggcatatcaatgctgacgaggtagaagaggttgccggcagattttcagtcttcactgtccccgtgcttcttttatttattgaggggactgagtttctgagagaagcccgcttcgttcattttgaacagctcgaagaaaggctgaaaagggtttatcagttatatcaagatgtataaagcgtttatactttacaaataaaaagccccctttaaggggatcgggctgtcgagaaaatctcgacagcctttattttttccttaaaatatcagacggtgtctttctcatgttccacaaaagaaacgcttctcaaattcaaaacacagccgaatttgttctgcttaaccaacttgtcgaagaggatcacctgctttgaaaaattgataaatacatagacgttatcgccctaccccagggttgtttccaaaatggaaatttcattatgacagtgaacaagacagatccatttgtctaaatcaccaaacgcttacatacgcagcaactgaccgaaaaggatatcgatcatataaatcaaatcctgaaatctgttccgaatgcccatttctcgaacaatggacaagatcaaagaaccaccaaaaggtcatcacccgacatgtatgggaggatgataaagaaaaggtcagacaaaatcgtttgtctgtttcaggaaaaaacctctgcaaaaaaaagaaaaaatagagcgaaggtttgcagattcaaaacagctgcatgggtttcgctattgcaggttgggaaaacaaaatgtgagggaacaagttctcctcacagccgcatgccagacatgaagaagattgccgcatacctagtcaagcaaggctaggcatgcgggagtgctttttctggacctgaaatcaaatgaatatggaaagaaacggcataaaacaaaaaagcttgtagaaaaaacatcattttctctacaagctgaaggccgttatccggccttttttgcgttattcagatcggggctctaaaaaacgggacccgcccaagtcttttctcatcagatagatatggaaaaagtattctccgacagcaatgatgatggcggaaataagagcggcaaacgccagtcttcctcctgaaatgcccatggacagcggcattcccatcagccatacaacaagaaacgcgattccgaaatcagcggacgccgccgtaatgttattccatctcggcagcacgtaaagatcgcccgtaaagtaggaaacggctcccaacacaatggtcatcagcagcacgtcgccgaatgtaaagcggaaacctaagccaagtatcagatacagaataatgatggtcataatgcctttaatggcaagcgctttaatgtgctccatgcgaattcctccttatggaaatcatgttagtatgtttcctcatcatgtgaaatataaacctttttttcgtgaacatttgttttctggcttttgtctgtcatcactgggccgcggctgaatatgatgaaaggagtaaaaacgggaggtgtcatgatggcagtcgtaaaagcgtcgagcgccgatgtcgatctaatggcaaggctgctcagggcggaagcggaaggcgaaggaaagcagggaatgctgctggtcggcaatgtgggaatcaatcgggtgcgggcgaattgttctgattttaaaggtttgcgtactatcaggcagatggtatttcagccgcacgcgtttgaagcggtgactcacggatacttttaccagaggccgcgtgaatccgagcggaggcttgcccgccggacgattaatggtgaacggttttggccggctaaattcagcctatggtattttaagccgccgggagactgcccgccgacttggtataatcagccgtttgtcgccagattcaaatcccactgcttctatcagccgacaggcgaaacatgcgaaaacgtgtacaatacattttaatcccggacgcaccgttcttggaatgaacggtgtttttttaatttcttgtgaagaaaaataggaacaaagtgcgcttgacggatgaaaagccgaaaagaaacagagggggatttctcccggctgggcaaaggtttgtcgaaaacaatgtgaaaaatgtctcccgccgttcattttccggccttacaaatccttcacactcttcatagcggtttaacatttcttttttataatgagggcgatcaatgagaagaaaggggaactgacatgacacatgacggccgtttagatgaatggatcaaggaattggagaccaaaagctttcagaacaatacgtttgaccgccgcgcatttatacagggcgcggggaaaatcgccggtctttccctcgggttagcgatcgcccaatccatcggcgcgtttgaagtgaatgccgctccgaaattttctaactatccgttcaccctcggcgtagcttccggcgacccgctgtctgacagcgtcattctctggacgcgtcttgccccggacccgctgaatgggggcggcatgccgaagcaggctgtgccggtaaattgggaaatcgccactgatgaacatttccgccatatcgtcaaacgcggaacggagatggccaagccgaatctcggacactccgtccatgtcgaagcggacgggctcaagcccaataaagtgtactattaccggtttaaaagcgggcatgagctcagccccgtcggccggacgaaaacgctgcccgcccccggtgctgacgtgtccgccatgacgtttgcgtttgcctcatgccagcagtatgaacacggctattatacggcgtataagcatatggcgaaggaaaagcttgatcttgtcttccatctcggagattacatttatgaatacggaccgaatgaatatgtgtcaaaaacggggaatgtcaggacgcacagcagcgccgaagtgtatacactggcagattaccgcaaccgtcacgcccaataccgctctgatgccaatctgaaagccgcccacgccgcatttccgtgggtcgtgacatgggacgatcatgaggtggaaaacaattatgccaatgtcatccctgaaaaaggccaatcggttgaagcgtttgtgctcagacgggccgcggcttatcaggcttattatgaacacatgccgctcaggcgcatgtcactgccgaacggtcctgatatgcggctgtacaggcaattctcatatggcaatttagcctcgtttaatgtgcttgatacaagacagtacagagatgaccaggccaacggagacgggaataagcccccttctgatgagtggagagacccgaaacgcacattgatggggacagagcaggagcaatggctgttcgaaaatttagccgcctcaaaagcgaagtggaatgtgctggcgcagcaaatctttttcgcgcaatggaatttcggaacaaccgccaatccgatattcagcatggattcatgggacggctacccggctcagcgggagcgggtcatcaattttataaaaagcaaaaacctgaacaatgtcatcgtgctgacgggtgatgttcatgcaagctgggcatcaaacctgcataccgattttaatcaaacgaattcaaaaatcttcggcgccgaattcgtcgggacttccattacatctggaggaaacggggcggataaacgggccgatacggatcagatcttaaaacaaaacccgcacattaagtttttcaacgattaccgcggctatgtccgctgtacggtaacgcccgcccaatggagagcggattacagagtggtgccgtatgtgacggagccgggggctgaggtatccacgcgggcttccttcatttatcagaaagaccagacggggattcggaaggtctctcaaaacgcggttgcgggaggcttaaagcagtcaaacgaagtggaagaggatcgattcttcgcccataacaatgcgcacgaaaagcaaatgagaaagaaacgggtcaaaatctcacaataagggggcacattcatgttttcaaatatcggcattcccgggttaatcctgatcttcgttatcgctcttatcattttcggaccttcaaagcttccggaaatcggccgtgcagccggccggacgctgcttgaatttaaaagcgccgcaaaaacactggtctcaaatgaagagccggacaagcaggcggctgagaaagacaaaacggcaggctgaatcatgacacgggggcagacgaatccgcttctgcctcttctttcatataaggaggatgtacgattggataaaaaagaaacccacttgatcgggcatttagaggaaatccggcagcgtctcattaaaaccgtcatcgcctttctcgtgttttttatcggcgcctgctggtttgtgcaggatatttatgactggctgatcaaggatttgcctggcagactggccgttttaggcccgagcgagattttatgggtgtacatgatgattgcgggaatttgcgccattacggcaacgattccggttgccgcctttcagctctggcgttttacggcgccggccttgaccgcgtttgaacgccgcgccgctttgctttacattcccgggctttccgttttgtttatcatcggaatttccttcgggtattttgtgctctttccgattgtgctcggatttttaacacaattatccgccggccactttgacatggtatttacggcggataagtattttacctttatgcttaaccttacattgccgttcgggtttttgtttgaaatgcctctggccgtcatgtttctgacgcgtctggggatcgtgaacccaacccggctggcgaaggcgagaaagctttcatattttttgctgatcgtcgtctcggtgctgattacgccgccggattttatgtctgactttctcgtcatgattccgctgctcgtcctctacgaaatcagtgtgacgctgtcccgcatcgtttaccgaaagaaatgggccgagacgccgtctgccgcttagtgaagctcgcctccgccggtctcaatatcgtcctcatgcgccgcggcggtcaccgcggcgattttgagcgcttttgtgatgtgatcaaggctgaggctcggcgcggatttctgcaaggtttgttccggaatgtacgggatgtgtataaacccgccgcggatgtgcggatgatggcggctgatttcatccatcagcccgtaaaagagatgattgcatacaaacgtccccgccgtgtaggatacagccgcgggaatgccttcttttttaatctcctcaacgatccgtttgatcggaaggccggtccaataggctgcgggaccgccttgagaaatgtcttccccgacaggctggtttccttcgttatccggtatgcgcgcttcattcagattgatcgcgacccgttccggcgtgatctgcattctgccgcccgcctgcccgacacagatgataatgtcaggctgatgtttcttcatcgcttcgcgcagcacggcaagggacttgtaaaaaacggtcggaacttgttcggatacgatagaagcggggccttcagcggcaccattcagccgtttgaccgcttcccatgaaggattgaccgtctccccgccgaaggggtcaaagcctgtaagcaatacttttttctccatcaaaaaccctccttttctttttaccatactctataatggacatatattcctgccgaagggggaaacatgtcttgaattcgcctctgctgcaataccgacctttatttccggtgctccaaacacatacgatgctcgcgagctgctctcaaagcgctcttgcccggccggtgtcaaaagcgataaccgattatcaggaaagcctgcttcagtacggaggaaattgggaggaagccatcggacgcacggagcaggcaagatgtgagtttgcgaaattgatcggcgcccagcctgaagaaattgccgttttaccttcagtaacggctgccgcctctgccgtcgtttccgctttaccagattgccgaaagaaacaggcggtgtatacggaattggattttccggcgatcgctcacattctgaaggctcagaccgggatggagctttcagtgattccgtctgaagaaggaatgattccgttagagcggtatgagacgtatattacggagcagacgcttttcacctgtgtgccccatgtgtcatatacatccggttttgtccaggatatcaagcgcattgccgagatatccgcaaagaagggatcgcttctttttgtcgatgcttatcaatcggcggggcatgtcccgattgatgtgaacgagtggggagttgatatgctggccgcgggtgcgagaaagtatatgcttggcataccggggacggcgtttctttatgtcagaaaggaacttgccgaacggctgaagccgaaagtcaccgggtggttcgggcagcagcgggcgtcgatgctggatttgacccatttttcttatgctgacggagccaaacgcttcgagaccggaaccccggcatttatcagcatatatgcggcacaggcggctttatcccttttaaacgatatcggcacagattgcattcatcaagaagtaaaaaaactcagcgcatttgggtacgaatacgcttctgaaaaagggctgcgcctcgcaggcccgacgtctgccgatgacaggcccggcatgatttccatatgggatgaaaaagcggcggaaacggctgcgtttttgaaacggaaaaacatcgtatgcgcgcccagcgggcaaatcatccggctggcgccgcatttctataacacggccgatgaccttatttatgcgattgatgaactggctaaagcgcgcggtatataaaaaacagcagactcatggagagtctgctgttttcttatgagtgattcactttgacccgcttcataaagaaagcgctgatcaggccgataacggcgacaatcattgcgaagataaaggcgtgctggacgcccgcaatcagcgcgtgggagtatacggaaggatcattcggatttttcacggtgctcatataatccttctgaccggccgccatgatgctgaccgccaccgcagtgccaattgcgcctgccatctgctggagcgtattcataatggccgttccgtccggataaaattccggcggcagctggtttaacccgttcgtttgcgccggcatcatgatcatggaaatgccgatcatcaggcatgtatgaagcacgacgatcagaagggccgtcgaagcgccggtaatgtttgagaaaaaccaaagcacggctgccgtgatgacaaacccaggaatgacaagccacctcggcccgtatttatcaaacagacgccccgtcaccggagacataaagccgtttaaaataccgcccggcagcaggatgagacccgacgtaaacgccgtcagcatcagtccgctttgtaaatacataggcaatagaagcattgttgataagataaccatcatacagataaatacaatcacgactccgagaataaacatcggatagcggaaagcgcgcagattcatcatcggctgcttcattgtcagctgcctgatggaaaataagatgagcgctatcgcaccgacagtgagcgagccgataaccgtcgggcttgaccagccgcctgatccttcgcccgcattgctgaaaccgaagacgatgccgccgaatccgatcgtagacagaataattgaaagcacgtcaattttcggctttgtaatgtctgatacgttctgcatgtaggcgattccgaataaaagagccaagacaagaaacggcagggaaatccagaaaatccaatgccagttcaaatgttctaacacaagccctgaaaaagtcggaccggtcgcaggggcgaacatgatgacaagcccgatcgtccccatcgccgctccgcgcttatgcggcggaaagatgacgagaatcgtattaaacatcagcggcagcagcagcccggttcctaaagcctgtacgattcttgccgccaaaagaaacggaaagctcggcgcaagggccgcaatcagcgtaccgacaatggaaaaggcgagtgacacgatgaacagctgcctcgtcgtaaaccattgcagcagcagccccgaaaccggcacaagaataccgagaacgagcaggtagcccgtcgtcagccactggacggtcgcaggagtgatatgcagctccttcatcaggtcagtcagggcgatattcagcgccgtttcactgaacatgccgataaaccctgccgtcagcaaagaaatcatgatcggcatgactttatattgtttggaaggttgagcgttttccaaaatcattctcctctcttacatacgtaacatgtctctcgtattttatgtcctcagaaggctggggatttgttttgaaatatggatgatcggcattttgtcttttttggctaaggacaaaatgatgccgccttctatcatggcatttaaaacagtgctgatttccgccgctttctcatcagaaaaaccggctgatctcaatttgcccgcgaacagattctcccactcctgataagcgcactgacaggcctgctgaagtttttcgcttcttaaagcagtttcagcagccagtaaaccgacaggaaacccttcgaagttctccggacatgtaaattggcgtgataagtcctgtaaaaacgcttgaatgctttccgcaggatcaggataggcatcaaggctttcttttattttcatacggatataatggctcatttcattgacagcctcaatggcgagctgctctttgccgtccggaaaatgatagtaaagagaacctttcggcgcaccgctttctttaataatctgattcagtcccgtgccgtaatacccctgcagctgaaacagcttggttgccgcggcgagtattttttcacgagaatctccataactcattatgttcccaccttactgattgatgacaaatttaaatatagtgactggtctattatcgtgatttcacatggcggtgtcaaggatttttgaaacggatcttttctcaggaagattcaaaaatcgttaaggcatgctgtttttatatgatggaagaacaaaagcagggatagggggagttttctcttcatgcctgacagcttcaaatcctctcaactctcaaacagccgatgctcaatgcatctaggaaaagagaaccgggcgctctctcctttttttgattgccgtattaaagcataatcgtgctatcggaaaggggcgactttcttatttttccgctcttatttatttgtagaaaacagtaaataatacactattttttccttttctcaactaatagaatgaaaatttcaaaaatattacatagcaggaggaaagttcatgaaacaaataaaaagcaaaatcctagccattcttacagtttgtatgctgtccgtcatttccgtatttgccttccagccgaccgtatcaaaagcctcctcaggtcataatccggttgtcatggtccacggaatcggcggagcgtcctttaacttcgcgggaatcaaaacgtacttggcatcccaaggctggtcaagaaatgagatgtacgccattgattttctggacaaaaccggaaacaacagacacaatgcgccgagactgtcaaattacgtgaaaaaagtgctcagcgaaacaggcgcgaataaagtcgatatcgtcgcgcacagcatgggcggcgccaacacactctattacattaaaaatcttgacggcggggacaaaatcgcaaacgtcgtcacactcggcggagcgaacggtcttgtgaccaacagagcgcttccgggaactgatccgaaccaaaagattttatatacatcgatttacagctcagcggacttaatcgtcatgaacccgctgtcacgactgatcggcgcgagaaacgtgcagattcacggtgtcgggcacatcggacttttaatgaacagccaagtaaacgggctgattaaagaaggtctgaacggcggcggacaaaatacgaattaacagattcagagccccggatatagagaatttccggggtcttttttttcttccatattcttttttcaccgtaaaccaagccctctgaagttatttttgttaaaataataaagttatatcagaattcggagggtttattgtgggaaaagtgaaaagaaatgccccttgcccatgcggcagcgggaagaaatataaaaaatgctgcggaagtaaagcagctgacattccggcagacatcgcggcaaaagaagcgaaacagattcaggaaagcttaatggagtacgcttttacagcacatagagacggcatatcatcatttattaaccagcacgagttcattgcggagctggacagacagacaaaagacatcggcgtcttcaaccttggcatctggggaattttcttccggccgctggcaggcggcaagacgatttttgaagaatatcttcagaaaaaagccggcggcatcaaccgcccgaaaactcgggaaatcgttgaatcatggaaaagcatgacacctgccgttatggtgcttgaagatgtgaaagaaggaatgattcactttgaagatgtcatgacaaaaaaacaattcaaagtggaaatggacgtcagccagcaggatcttccgccggcgggaagcctgattctcggctatccgatccacgaagcggaaaaagcggagttcttcatgcagtttacgatcttccctgtgaagcggaccgaagctttgatcagcaaagtgaaaaaggcggcggccccggcccttgcggaaggaaaatcgcctgaacgctttatgcaggaggacttcgacactgtgctggccgctcttttaggaacggcggaagagccgaagcctgctgctgaagaaaaacaggcagagtgggcgaatgacatggagaaggagacggcggacgccattgaaaaaggtctgagcggggatgaatacccggctgagctggttccggccgttattgatctgtggaaaacattctgtgtgaaaaaaacaccgacgatcagaaagccggaagccttcgcggcagcggtcgaatattatgtgaacagcatttctctgaacggcgcgtccgtttctcaagccaagcttgcgaagaagtacggcgtcagcgcatcaacgatttccagccgctacaaagaaatcgaaggcgccctgcaggatgaagctgatcgcttcgccgcggctctgacatcttaatagcttaatagacggcaaaaaaaccttgaagggcaaacgcttttcaaggttttttctattgatgcgctctcaggaaggataattcctgccggctatcaaataataaaaagagcgataacaggaaggggatggagccatggatgagacacgtacgctgggcaggacggatttacgggtaaagcgtatcggctttggcgcaaatgcggtcggaggacataacctgtttccgaatcttaatgatgaaacgggaaaagaactcatccgcacagctttggatggcggcgtcaattttattgatacggcgtttatatacggcttgggtcgttccgaagagttaatcggtgaagtcgtcgcagagcgcggcgtgcgggacagccttgtgattgcgtcaaagggtgcgcataaagaggtcaacggacaaatcgagctggacaacagccgtgaatttcttcggagtgaggcggaaaaaagcctgaagcggctgaaaacagatgtgattgatttgtattacgttcacttccctgacggtaaaacaccgctggccgaagtggccggcacgctaaaagaactgaaggacgaagggaaaatcagagcgatcggcgcctccaatctcagcttccggcaattgcaggagttcaacgctgacggctatttagaggtttttcaatcagaatattcactgattcagcgtgaggcggaaaaagatctgctgccttactgtgaaaagaacggcatttcctttatcccttatttcccgcttgcttccggcttgctgacaggaaagttcacaaaagacacagtctttgaggacagccgaaagaacaggccgccgtttcagggagaagcttttctccaaaacttggagagagtggataagctgaagtccgttgcggaagaaaaaggcgtgcatgcagcgcatatcgcactcgcatggcttctctcgcagccggctgtggatgcgatcattcccggagccaaacgccctgaccagctgaaacacaatctcggcgcgcttgatgtgcaattaaccgaagacgaggttcaatatatcagtgacatcttcaagtgaaaataaaaaaggaaatagcctgcgctatttcctttcttgctgtcaggacgttttcaaaaacgcttctgtcaatccttccagatcggcgtctgtgtccaaataccactggccgcgggcgtttttcttcatttcgatttctttcgtcacggaagaagaagccggtttcaggcgcataaactcttctggatagacagaaagcagatggctgacaatttcgttttcatcagcatcgggatgctttccggcgtagtcctgcacacggtcttgcagccggcctgcaagcggagacatatcaagcggcgtcacttttgcttctaggacggctttgccgtctgacatggatttggtttgcaccttgagttctgtgtgttcacgcagcgctgatgacatggcgtcaataatagcggaaatggcttttgagtccgcttgttccttcgaaatgcctgctgaagcgataaagctcgctttcgccgattcctggtatgcggcggctgtcattttttcatttacaccggtcaggcgggtgaaatctttattatgccggccgtacagcatcacatcaatgtatgcggataatgcgtccgccggatcgggttttgctttcggagctgtgcctttgactttcagtttataagataaaggcttcgcgtcttttgcctgcggctgatataccaattcatatgatttgccttcgtcagccgtgaagtacagacttcccgtcactgtcttgtccgcatgaagcgtgccgctttgcatccggtcttccttatcggccgcagctgttttcgcgtcattctgataaagcgagaagtcgctgcttttgacggtaagcggatcattgcccgtatttttgacagtgaccgttactttcagtgcggtcgggtgttcagcatcgtctgaagtcacccaggccgtatcttttatttttactttcgccgtgccgctttccttgccgccgcttgtttcgctgctgcaagcggcggtaaatgccgtgagaagcaaaatgaaaaacacggcgctcatttttttaatggacatcttgttaccccctgttgttatgatggttgattcaatagtcatatagatgaacaggttaattatactagttttgtataaaagagtcttgatctttttggaagaaaaggaagtgttatgatgaagaaagaagaattgaaacagctggctctcagaatcggaaacgtacctcctggctacgagagtaatgtggaagaataccaggaagatgaggttctgttttggtgggaagacaagaacgatccggaagccggcatcatggtcgaattggaaccggacggaaaactgaaatacttatcccgtccggctttccggactgatcttgctcctcttttggaaacggacatagaagaacggatgcgggcgtttttagaaacccatcgtccgggggcattggctgagttcgaattggagaaaaaaagctccgtaaatgatggtgatgtaagatattcctatgttcagatggcttacggtctgccgcttccgctgaccgggttttacgtcgacctagctgtgacaggggaagtaaccggcttttcgtaccaagggaaggccgatgatctgttaagacccgggacaattgcggacaagcgggaagcatcggctcattttgtcaaacagattgaagcagagctgttgttcaccgtactgcatcagtccgtctatgtgcagggggatgacaagccccatctcgtctatgaaatcgtgtctccgacgcggccgatatctgctgacctgaaggaagagaatgaagaaatagaagagtatgaagagctggaacacaacacgcggccgtatgtctcgatttcacgccctgaacctgaagcggaaaagatgagcatcaatgacatgatcgggctgcatgacggtttttataaagatagggaaagcgatcttggggacggctgcatcggcatagcgtggcgtcgtgaaaaaacaaaatccgcacgggaagataaaagctttgaaagtctgtttaaagagcggaatgaacatgtattgaaaacaaggtatgataaagaatcaggccggctcaccggggtgatgtcatttatacaagaagaaggcgaaccggtgttttccgaggaagaatgccatcacatggccatccgctttttattcgccatgtttccggaagcggatcagtatttccgggttcaatatgatgagccggatgatgaaggagaaaacgcgggacttacatataaggcctgttcgggcggcgttgatttgcgattcggagaaggaagaatctgtgtcagcaaaaagacgggtcttgtcactttttatatgccgccggaaattgatccgaaagagcttgagaatatcgatcccgttccttcattgacaatggaagaggcgaaggatgcgattcgccggaatatcaaagcagagctcgcttgggaccgttacgatgacggcagcggcagaaatgtgtacaggctcgtatacaagccggttttcccgcggtttattgaggcgcatacgggggaagcgatcatgagtttaataggctgaaggtcataggtgttcggtttgggggttttaagtgacatgtgacatttgtatgaaaaataaccgccctgaatacggctctttcccctctttgctaaaaatagacacataaaaggcactttcttccctttaaaagaataaggtcatttttatataataaaaaacagttcttttttatacactcttcctgaaaggatgaccccattgctgaaagaacatctgagaaaaaaagcgctggagattgggaacataccgccgcactatgagcttgaaatagaagactttgatgaaaaacaaaaaacgagagcctattatatatggaaagatcgtaaccatccggaaaaaacggtaacgattgagctgggcggcgacggatctttgcttacatattcacgcaatgactgtccgggttcagaccttcagttgtcagacgccgaattaaagctgacggctctgcggtttgcggccagacaccgcccgcttacttttatgaagttcacctttcaggcgagggaagaacgaaatgggtgcatccgtttcatctatacaaaaaaagtgctcggccggccgctccccgattcgggttttttcgttgatgtaaccgagagcggcttcatcgtgcagtttctctattacggggataagggtgaagcgcccgtcccggaaaccttcgtcgatcaggagaaggtgatctcgcattatatgagcgggctgaccttcagtctcgtctatgacgttgtcaattttgagaaaacgccgcgccttgtctacgaaccgattctcccggcttacagctatccggccggagaagatgatatcgtgccggatcagccgttttgcgaggacaggaacgaatcggcaaaaccgcttcccgcgcttgaacataaacgggaagtcagcatcgatgaattgatgggatttaccgcggatatgattcagacgcgccggcgcgatctcggggatgagatcggaacgacatggcggaaaggggcagtcccggaacggaaagatttgagtatagaaagctattttgaaagcagcaacaaaaatacaatgaagatgaaaacggacaaaaagacagggaagatgacagcctttaaatcttttattgagcatgagggcccggccttttattcagctgaagaatgcgaggaaaccgcgcttcaatttttatacaagctttacccgagagcggacgagttttttaaaatgaatccgctgaaaacggacgggaggggacggttccgctaccatttttccgtatggcatcgggatattccgcttcggttcggtgctgcgagaatacttgtcagtcccgtaaccgggcttgtggaagcttacatggcgcctgatattgatccggagcagttagagcagatcaatccggtgccggccgttactatcgaagaagcaaagtccgcttttttatctgattttcatctgcagctggagtggcagcgcgattttacgccgtccggcaatgaaggatataagcttgtgtacaggcctgtatatcctccgtatattgatgcgcataagcaaaaaaagaaaaggttttattagccagggatcatttgtaaatgaggataatctttaaagtttctccaatcgcctccccaatcaaaaccgagcgttttggcaatcgatacgacctcaagccaatcgggcctgccgttttggtttccgtcgtacgtcatatcccaaatcaggctgccatcctttttttgcagggcgaagtcgatggcaaggccgtaattgtgatatgattctccgccttttgcgtaggtgacgatatttcctttttttgaacgtccttgacggtacaattcgttttgttcctcaattgatctgaaaccctctgtaatcacgacggtgatgccttttttcagagcggccgtctgcaataattccgcattttgtttaacgagcggatgaagagcatttggaatgcccctctcttgtaacgccgtttgcggcctcagctctttctgcacataggaaaaacataggtccgcggaaaagaagaggatcaaaagcaatgctattctgactggtaatctcatggtgaattctctctttctttaattgattaaaatctttgtttgctcactgtcataaatttgctatgataaaatataacataattagtagccggaggaaggaggcaaatctatgaaatccaagattccatctgaagaagtagccgtaaagatgaatgaatggtataagctgatccgcgcgtttgaagccgataaagctgaagcgctgaagcgggagattcaatatgaactcgaagatatggaagaaaatcaggatttattattgtatttttcattgatggaatttaggcatcgcatcatgctggataaattaaaacccatgaaagacggcgactgccagcctccgttctctgaaatgctcactgagattgagatgaaccagcaaaagctgaccggcttactggaatattatttttactatttcaggggaatgtatgaatttaagcagaaaaacttcatctcagcgatttctcattataaacgggctgaggaaaaactagaatatgtggaagatgacatagagaaagccgagtttctgtataaaatttctgaagtgtactatcatatcaagcagactttcttttcgatgaattacgcgggacaggcgcttgatatttacaagaaatatgaattatacggaatgagaagggtgcagtgcaaatttatcattgccggtaacctgatggacgcccagcagcatgaaaaagcgctggaataccttgaatgcgccttggagcacgcggagcggcttgatgatcactatatgattgctgcggcctattataatatcgggcactgtatgtacagtttgggtgacttttgcaaggcggcggaagactttgaacgagcggctgccggttttgaagcgcacagcttccagcaggtcatccaggctgttttttcactcacgcatatctactttaaaacggaaagatacagtgacgccgccgccagctatgcgcggggcatgaaaagcgcggcggagtgggaagacgagatctatatgacaaaattccgtctgattaaggagctttatcagggtgacggcggacaggattcgctcaaagagtattttgacattctggaatcaaaggagctgttggccgacactgaggaactgcttcaggacgcggctcatttctttcataaacgggagaactacaaagcggcatcttattttttcagcaggcttgtcggcgtgcaaaaaaggctgcaaatgaacaattacgcataatgaaaaagaacgggggagcttcggtttcgtcgttctttttatgatcccttctgttttcagccggtcaaaaccgggtacatgctctgtattaacatcagggaggaaatgagacaatgtatcaggatttacagggaaaaacagcgatcgtaacaggttcttcgaaaggaatcggaaaggccattgccgaacgcttcggcaaggagcggatgaatgtagttgtgaactacctcggtgattccgccggagcagatgaagcggctgacttcattgagaaagcgggaggccgagctgtcaccgtaaaagccgatgtatcttcagaagaagggattcaggcgctgtttgatgccgcacaagagcacttcggcggtgtggatgtgatggtcaacaactccggctttaatggcgccgaagcgatgccccatgaaatgagcctggaagattggcaaaaggtcatcgacgtcaacgtgaccggcacctttttgggggcgaaagcggcccttaaccatatgctccagcgcgggacaaaaggaacggtcttaaacatatcgagcgtccatcagcaaataccgcgtcctgaaaacgtgcagtacgcaacatcaaaaggcgggatcaaaatgatgacggaaacgatggcgctcaattacgcagacaaaggcatccgggtaaatgccatcgctcccggcacgatcgccacggagtccaatgaggatctgcaagatgaaacacacaaacagacccagctgaaaaaaattccgatgaacgccttcggaaaaccggaagaagtcgccgcggccgccgcatggatggtgtcggaagaagcaagatacgtgaccggaacgacacttttcgtcgacggaggcatgacgctttatccgtctcagctggaaaggtaaaagaggaggggaaaccttctcttttttgtttagggaaggatcataaaggaaatggttccctaaaaaaacagggggatcacaagatggcgaatgactggtggaaagacgccgttgtctatcaaatctatccgcgaagcttccaagacacgaacggcgacggcataggcgacctgcggggggttatcgcgcgtctcgattacataaaagaacttggcgctgatgtgatatggatctgcccgatttacccgtcgccaaacgtcgataacggctacgacgtgacggatcatcaagcgattatgaaatcttacggaacgatggaggactttcacgatctgcttacggaatgccgcagccgcggattaaagcttgtgatggatttcgtcttaaatcatacatccacagagcatccttggttcaaagaagcggaaatgaatccgaacagcaaataccgtaaatattatttttggcggccgggcaccgcagacggcccgccgaccgattgggtgtcggattacggacaatccgtctggcagtacgaagagcatacaggtgaatattacctgcatatgaacgccgtcaaacaagccgatctgaattgggaaaatcccgaaatgcggcaatcagtgtacgagatgatgagattctggctcgataaaggcgtggacggattgcgtattgaccagctccatcttctgtcaaaaaaagaatacctgccgccgtatgaagattatatcgctcgccgggctgatccgaagcctttccggccaaacggagcacggatacatgattacttaaaagaaatgacgaaagaggtattttccaaatatgacgtgatgtcggtcggcgaggccggatcagtgacgcctgaggaagggctggtctacacgggaaccgatgagcatgagctgaatatgatttttcattttcagcatatggagcttgatcagaagccgggacaagagcattgggatgtaaagccgcttgagctgtctgacttgaagaaagtgctcacagactggcagaaaaaacttgagcaccaaggctggaatacgctgtattggtgcaatcataaccagccccggatcgtatcccggttcggagacgaaggcaaataccgcaaagcatccgccaaaatgcttgccgccctgctttatttcatgaaaggcacgccgtacatttatcagggagaagaactcggtatgacaaacgctccgtttgacaggatagaggattatcaggatattcagaccgtcaatatgtatcacaaaagggtatttgaaatgggccgtgacagagaggaagtcatggcgtccatcatggcgaaaagccgcgaccatgcccgtacaccgatgcagtgggacggaagccgaaatgccggatttacagaaggagaaccgtggctgaaggtcaatcccaattacaaaacgatcaatgcagccgaggctgagaatgatcccgattccgtattgaacttttacaaaaaactgatccgtttacgaaaacagtatgctgacgtcataaaaggcagctacacgctgctgctccctgatgacccgcagctgtttgtgtatgaaagacaggcaaacggacaaaagctcatctctatcagcaatgtatcaaaagaagaagccgccttttattggccggacggttccgagcctggaagtgcgaaactgcttctcagcaactatgaaaatgccggaagcgcggattcctgcataacattccgtccatatgaaacaagagtctatctgcttgcctgatcctgagcagtcttgatccgcttggcagccgtcctcgtttcttttgtaacggggatgcttccttttgctttggcgagaccgaatgccggcatattgacatagatggattcataactgccagcgggaactgtatatgtttcatggtatataccgaccgcttgagatgcggccgcgcgctgataaaaatgccgccatgctttcatatgtttttctcctttggcgtaggacataaggtcatcaaaagagcgccaatattggatcagtgtaatgcttcgtaatgtacaggacatttccatagagagaaagccgagctccttattggcatacaattctttaatcattggcgtcattgctcggacaacaggaagccagcgatgtattgaaggccatttgttaattcgaacaccgataataaagacgacggtttcttcattggagcgggctgttacctgtgaagcggtgatcatctgttttttcatttaaagctcatctcctttttgcagtttgctgatgacggcatctgcccactcgatcgcggccgctgtcactcgtttgccgtagtcaatagtaaacagcctaagctccataccatcccgttttaaaagtgattgttcgattgtttcatacagttcatatttcatattgagctggagtttatagtgctctatcatccggatatttgaggcagtgtcttgtttatcgctgaaaaaaagcttcagcagcaactcatttttttcggcagctggctgcttgaccggctcgttcagccaatcctgtaatgcatcttcacccttttgggtaaggtggtattcttttttgtcaggacggtcttcttgaacggttgttgtcaccgtcagcaatccttcttctgtaagccgttttaaattaggataaatctggctgtagctgatggtccaaaaatgctgcaaactccgatccatcatttgctttatttcataacccgtgtgacatcctattgttattaaaccgagtaaggcgtaataagtatcagatttcttactcaattttcaccctcctatatattcaatagatatatatcaattagatataataataacggaaacatatctacacatcaattcttttcaaaaaatatcttgcaaaacgtaattacttcgttttattatggtataggaacaaatgaacgagaaagtacaaagtacggttcggaaatcgtcatcattctgatttacaggacagggggaaacgagcttgtttaaaaaatggagcggaatcattgtcattgcagcatgctttttaattgcggcgggctgcggcaattcatctacaaaaggttcgtcaggttcttcgaaaaacggcaaactgcacgtcgtgacaaccttttatccaatgtacgaattcacaaaacaaattgtcaaagacaaaggcgatgtagacatgctcatcccgtcttcggtcgaacctcatgattgggagccgacgccgaaggatatcgccggcattcaaaacgccgatcttttcgtttacaacagcgaatatatggagacatgggttccctcagcggaaaaaagcatgggctccgatcatgcgaagtttgtaaaggcgtcaaaaggaattgacctgctcgaaggttcggatgaagaggaagaggagcatgatcacggcggtcatgaccacagccacagcatggaccctcacgtttggctgagcccggttcttgcgcaaaaagaggtcaaaaccattacggcgcagatcgtaaaacaggatccgaagaataaagcatactatgagaaaaacagtaaagaatatattgcaaaactgcaggatcttgataaactataccgtacaacattaaataaagcggcgaaaaaagaattgatcacacagcatgcggcattcagctatttagctaaagagtacggtttgaaacaggtcgcgattgcaggcctttctcctgaagaagagccgagcccggccaaactggcagagctcaaaacgtttgccaaaaagcatgatgtgaagatcatctactttgaagaagtcgcatcgcctaaagttgcagatacacttgccggtgaaatcggcgcgaaaacggaagtgctcaatacactggaaggtttaagccaaaaagaacgggataaaggcatcggttatatcgacattatggagaaaaacctcgatgcactgaaagattcgctattggttaaataacatagtgtgcgccgcggggtgcacactatttctatgcgggaaaggaagatcagcatgaatctcgttacattacaggatatcgtttttggttattcgcatacacccgtgcttgacggcgtgtcgctggaaatcaaaagcggcgaattcgtcggcattacagggccgaacggcgcgtcaaaatcgacgctgatgaaagtcatgctcggcatgctcagaccttgggaaggaacggccgagatcagtaaaaaaaatgccgccggaaaacgcctgacaatcggctatgttccgcagcagatttcttcatttaacgcaggatttccgagcacggttcttgagcttgtgcaatctggccgttatacgaaagggaaatggtttaaacgattaaacgaaacggatcaccacgaggtggaaaacgcgctgaagatggtggaaatgtgggatttccgcaaccggaaaatcggcgacttatccggcggacagaagcagaaaatctgcattgcgagaatgcttgcgagcaatccggatctgctgatgcttgatgagccgacaaccgcggttgattatgaaagcagacagggcttctacgaatttatgcaccatcaggtaaaaaatcacaaccgcaccgtcgttatggtgacacacgaacaaaatgaagtccagcagtatctggataaagtcatacggcttgagaggggggaaaaaggcggatggaaatgtttgacttggaattcatgcgacgagcttttctagcgggaagcatgatcggaattatggcgccgatattaggcgtatatctcgtgctgagaagacaggcgctgatggcggatacgctgtctcacatttcattgtccggcgttgccatcggcttttttctcagtaccaatattacggcggcgagcatcgttgtcgtcacgatcggagcgatcggcatagaatacatgcggcgggcataccgtacatattcagaggtctctatcgccatattaatggcggccgggctgtcgtttgcgatgtttctgatcagtctgtcaaaaggcggcgcgtcgatgagcatcgatcaatatttatttggatcgcttgtgacggtcagccagcagcaggtctatattatcggcggcattaccctgctgattctgctttatttcattattttaaacagaccgctctatctgcttacctttgatgaggcgacggcgaagacatcaggcattaacacaaatctcttgtcaatgtccttcagcatcgtgacggggcttgcgatttcggtcattattccgattatcggcgtgctgctcgtttccgcgctgctcgtattgcccgcggcttttgcgattcgtatcgccaaagggtttaaatgggtgtttacggcagccattgtcatttctctgttcagtgtgttcacggggctgacgtcttcttaccagctcggaacgcctccggggccgtcaattactctactgttaatcattctgcttctgctcggctttacgctgcaggggatttggaatgcgtttaaaaaaggaaaagaacgaaaaaaccgccgttaagcggggctgcagtctcatctgccgctccgtttaacggctttttttatagaaataaatcagcgagacgttcgtatgattctttttttgcttcaaagtcaaagacgttgcagagcaccatcatctcttttgtctgataacgatctgacagttcaagcaggtggcgtctgactgcggcgggagagccgatcaccatccgcttcctgttttcttctatctgcttacggtcctccggggaatacgggtaagccttcgcttcttcaacactcggcacacggctgtcggcccctttcccgacacgaagcagccataaatcctggcttaacgcgagttcttccgctttctcatccgtagccgcacatatgacgaaaatggcacagagagaggcgggagcggaaaaatgggcggaggcccggaaatgatcctgatagatctgaaaggctttttccccgcgttccggattaatgaaatggccgaaaacatagcccgcaccctgctgagccgcgcgtctggcgctgttttctccgaggccgagcacccatagctgcggggctgtttcaatcaaaggcgctgtctttattcctgcataatcatgatccgcagggatagaatctgtcagaaaggatgataaatcctgaagctgtctgttgaactcggtcatgcttttcttgaccccgtctgtgagggcgagccggattttcgtcgtgccgccaggtgagcgtccgaccccaaggtcaatacgattcggatgcagcgcctcaagctgacggaatgtttccgcgactttataggggctgtactgcggcagcagaacgccgcctgagccgatacggatggacgttgtggccgcggcggtatgagccatcataatttccggcgacacgcttgcgagcccccttgtgccgtgatgctcggcaaaccagtacctcttatagccccatccttcgctgaggcgggcgagctccgcggaatggcgaagcgtctcgtgcggcccgtttcctttggatacgggcgcctgatcaagtatgcttaaatcaatcactcgtctgcccctttcctgaatgtattgatacaaggatagaaaaaatggttcgtccccgtcaatttctttgttttctctattctctccggaatgaaggagaatatagaaagtgaattttcgccgtttttcgtcaaaaattcttatgttttatgaaactttgatataataaaagacgtatatcttaataaataccgggatccttatcccggaattttgtgaaaatgcgcacttgcggcgtgcttatcggcacccttacagaataggagtgaatcatatggcgatctctttacaaaaaggacagcgaattgatttaacaaaaggaaaagcaggcctgtcaaaactgctggtcggattgggctgggaccctgtatcatcgggcggctttttcggaaagctgttcggcggaggcggtgccaatatcgactgtgacgcttccgtactgatgcttgaaaatgataaaatgacagacagcaaaaacgtcatctatttcggcaacctgaaaagccggtgcggcggtgtcgtacatacgggtgacaacctgacgggagaaggcgacggcgatgatgaacaaattctcatcgacttggcgaaagtgcccgcacagattaataaacttgtatttgtcgtcaatatttatgactgcgtcagacgcaaacaggacttcggcatgattcaaaacgcgttcatccgcgtcgttgatcaatctaaccgcgaagaattggtgacttacaatttaagagataactattcaggcaagacgagcctgatcgcggctgaaatctaccgtcaggacggcgagtggaaattcgccgcagtaggagaaggcacaaacgatacaaaaatcggcgatatcgttaaccgatacgcctaaacgaaaaaaaggagagtgcacacatggcaatttcattggcaaaagggcaaaaagtagatttgactaaaacaaatccgggtctttctaaagtcgttgtcggccttggctgggatacaaacaaatacgacggcggacatgattttgatttagattccagcgtctttctattaaatgaagcgggaagatgcgcgtcgcctgatgatttcattttctataatcagcttgaaggcggaaacggttccgtcgcacattcaggcgacaacctgacaggccagggcgagggtgacgatgaaagcgtaagagtcaacctgagtgcggtgcctgccgctattgacaaaatctcatttgtcatcacgattcatgaagcggaagcgcgcggccaaaacttcggacaagtctccaacgcgttcgtgcgcattgttaatgaagaaacaaatgaagagctgatccgctatgatctggctgaagatttctcaatcgaaacagccattatcgcaggggagctctacagacataacggcgaatggaaattttccgcgatcggctcaggctaccaaggcggactggcccgtattgcgacagattacggccttcaaatcggctgaaccatataaaacacagaagggagaggacggcacatggctattcaattgtcgaaaggacagcgtgttgatctgacaaaaacgaacccaggccttacaaaagcggtgatcggcttaggctgggatacgaacaagtactccggagggcatgattttgaccttgatgcgtcggcttttctggtcgatgcccatgacaactgtgtaaatgatcttgattttgttttttacaataacctggaacatccgagcggcggcgtcatccatacgggagacaaccggacgggtgagggcgatggagacgatgaacaaattatcgtcgacttcacaaaaatacccgcaaatatagaaaagatcggcatcaccgtcacgattcatgacgcggaagcgcgcggccaaaatttcggacaagtctcgaacgcgttcgtgcgcgtcgtcgatgaaaacaaccagaatgaactgcttcgttttgatttaggggaagacttctcgattgaaacggcggttgtcgtttgtgagctttaccgccatggggctgagtggaaatttaacgccatcggcagcgggttttccggcggtctggcatcactgtgccggaattacggcttgcaggtgtaagcaggaaattaccgttttactaaataggaggaaaaaacttggattttctacatcatattatgtcgacctacgcttccttttttgattggaaaatgtggggtgaggtgctgactgaccctgtatcatgggggctgatcggttccttggttctgctggaaggcctgctgtcggccgacaatgcgttagtgcttgcggttatggtaaggcatctgcctgaaaaacagcgaaagaaagcattgacgtacggattgttcggagcatatattttccgttttatctttatcggaatcggaatgctgctcattaagttctggtggatcaaagtgcttggcgcgctgtacctggcttggctcgtcattaagcatttctggatcggagaaggtgatgacgatacggaaggcatgaagaaaaattcttggatggtccgtacgttcgggattttctgggccactgtcgtttcagtggaactgatggatcttgccttctctgttgacagcattttggccgcgtttgcggtatcggaaaaagtgtgggtgctcttgatcggcggtatgctcggcattctcatgatgcgtacagtcgcaaaagtattccttgttttaattgataaaatccctgagcttgaaaacacggctttcgtgctgatcgggattatcgccgtgaaaatggcggcgagcgcttttgattatgaaatgccgcacgtggtgttcttcggaatcatcatcgctgcgtttgtggtgacgtttgtcatccattatttcaacaaacaaaagcaggttcaggagcagacggctgcatctaaagaagaataaaaccaaaaaggagggagagttcatttccttccttttttgtaccgataatcaagaagagaaaggaggaagatgatgaggcaggaagaattggtgatccgaaaggctgagcttgaaaacgatgactgggaaacgtttctgatgcagccgctgccggaacgccccggttacgagcgggaaaacgggctggcttttacccgccttgccgtcaggattttaggcactccttatgatgagacggaatattacaatacgcttttcgagctgtcttctcatgaaaacattcatgtattgagcgaaacactggataagaccatcgcgcctgaaacgtttcaggcgctgcagcacattcatacggtcaatcaaaaggagaaagggctttcggtttccaggtttgtcgcgtttctcgacggaggcaggctgcttgccaaacatcccgatccgcttatgcaccgccggctgagaaccgcgtttatgacgcttttggaaacctttgcaagccggcatgaaaacgggctgaatcatcccgatttccggcgtgtgctcctggatgtgtcaaagttttcgctgaaccacctgaatccatggctcgaacaagccgatatagagcgtgagatgccgaaggtggtgtggtatggagacgctgccaaaagccagctctattttctctattatttaatgctggtcggctgtgatgtcctattatttcatccggctggtgaagatctgttcagtgagattgatccggatgaggagctcagctttgtgataaagctccccgcaataggcggccttgagccttttccaaaagaaaaaccggttagaacctccacggcggcctaccggtcaaccaaagaaattgagcatgtgttaaaccatgaagagtcaatgatgtataagccttggcagttcagagagcataccccgcagtccgtgacattaaaaacgacgtatgatgagttatttctcattgcgaaggagcgggcctttatccgtccgcaatttaaagcggacagggagcgggttgccgttccgaacctttttgcgaaagtaatgggggtttccaaagatacgaaagaatattggaacaggctccataccgccgcggactatcaggagacacacatgatccgcagttttccgtttacggaagagctgaaagccaactaccagtatcattacagtcaagtcttaaatgaagaaggaacgattgacgcggaaaggctgaaaagaagcaacatctggcagtacaagcatctcccgtcaggggtgcagaccgccatcgccaatgtgatttctgacatgtgcagaaaccccggaatgaaggctttgccaggggagcaggcaagggatgccgctatttatttgttccgccaggcgacgaacctgcccgcttcgctgctgcaattgattcagacgtttgattacgcccaaaccgttccgaagctgcttttgtatcatacggaacaaaatggcgaattcacgcgttctgatgcggccgctcttttgtttttaaataaattcggcgttgatatcatcttgtataatccgccgggtcatcaggacatcgagcattatatagaagaaagccaatttgatgtccattggctggaggacatggtgtttcggcaggaatataaggagccgtcactcgtaagaaagctgtttagaactattacgcaaaagcagggagagtaaataaacatgacagaaaatcaaaatccgcttattcttgataaaaatgaagagatttctgaacaaaaagcagacgacatcaggctgcagctccgccaagaccctgaggtacagcgcatctcgcagcaaattgatgtgaaaaaccaaatggagctgctcgagtatggaaaagaaccggcagttgaaatctcgaagttctccgatcgcatcttaaatatgatgaaaacaacaagtgtcacagattcaggcacaatgctgacgcagctcggaaaaatcatggatcgttttgacaaaaatgatttcgatgagccaaagggatttctcgctaaaatgttcaaacgcggaaacagcatgattgaaaagatttttcaaaagtaccgcaccctgggcggagaaattgaaaaaatccatgttgaaatttcgaaatacaaagatgaaatggcaaagacgaaccatacgcttgaagagatgtatgagaacaacattaactactacatggagcttgaaaaatatgtcgttgccgggcagatgaagcttgaggaaatgcaggcgcttattccttcttatgaagaaaaagcggcgggcggaaaccagctggcgcaaatgcagctcgatacgctgcgcgacgggcttcaggcgcttgaagaacgtgtgtatgatttagatatggcgcggatggtggcgctgcagacggcaccgcagatccgcctccttcagcgcgggaatacgaagcttatcgggaagatcaattccgctttcgtcattacgattccgattttcaaaaacggcattattcaggctgtcactgtcaaacgccaaaagcttgtggctgattcaatgagcgagctggaccgccgcacgaatgaaatgctgaagcgcaacgctgaaaatatttcaagccaaagcgtggagattgcccgtatggcaggccgtccgagcattgacattgagacaatcgaaacatcttggaatacgattgtcagcggcatgcaggaaacaaagcagattgaggaagagaacagacgcctcagagaagacggagcgaaaaggattcaacagctccaagataatattaaaaacgcagtcttaaagaattaatcagcaccccgcttgcttacggcaagcgggtttttttgcgaaaaaagataatgacaatgtgtaaagacaggtgtaaacttatacggtaatcattttcgatttgaggtgctgcttatgaacaaacaacctgccgtcacaccgcgtaaacttttggcgattgccggaatgggctggctgtttgatgctatggatgtcggaattttatcgtttattatcgccgcgcttcacgctgattggaatttaacacccgatcaaatgaaatggatcggaagcgtcaattcaatcggtatggcagcgggcgcttttgtattcggaatgctggctgacaggatcggccggaaaaaagtgtttatgatcacgctgttattcttttctgtcggaagcggcatatccgctttcgcaacgggattgacggtttttctcatcttgcgttttctgatcggtatggggcttggcggagagctgcccgtcgcttcgacgctcgtgtcagaagcgtctgcccctgaaaagcgggggaggatcatcgtgctgcttgaaagcttttgggccgcgggctggcttcttgcggcggttatttcttactttgtcataccgtcattcgggtggcgggccgcactgctcttaacggcgctggcggcactttatgcgctgattttgcggagaagccttccggaatcaccggcgcatcaggccttatcacagaaaaaaagcatacgcgggcaggcgggaagtgtctgggcgaaaccgtatagccggcagacggtgctgctgtctgtcgtttggttctgtgtcgtcttttcctattacggcatgtttttgtggctgccgagcgtgatgctgatgaaaggctacagcatgattgagagcttcgaatacgtactgatgatgacacttgcccagcttcccggatatttctcagcggcttggctgatcgaaaaagcggggcggaagaccctcttggtcatctatttgctcggaacggcgggcagcgcttatttcttcggtgccgcggattcattgggtatgctgcttgcggccggcatgctgctgtcattcttcaatctcggcgcatggggcgtgctttacgcttatacaccggagcaatatcctgcggcgatccgtgcgaccggttccggcactgcggcggcagtcggcagaatcggcggtattttcggcccgcttctcgtcgggtcgcttgcagcccggaatgtatcgtttacagctatctttgccgtcttttgtgcggccatcctgattgctgtcatcaccatccttattctcggaaaagaaacgaaacagacagagcttgcgcaatgagcacccttttggggtgctttttttagtgaggcgtctgtttgaaagacctatatttttccttaatattccttaattttaggaagaggcaacacctttttttgggacaatatcgcaaaaaaattcttgtatttgtaaaaaaagggtaggaaatcagtttgcagcatatttgatggaaacgttctcaagcctgataaaagctcaatttcccttgtaatttatcatcattaaggaggattagagagtatttagaagcataccagaggaaaataagtcacatggatgtttttaaagtaatgatacaaaataaaagggattatgatgtttgtttgacttattacaaacgtgttacggtattaaagattgcttattatggagggaaaatatgaattcggatgagaaaccaattaagataaaagtcgaaaatgtatctaaggttttcggaaaacagacaaaaaaagccattcagatgctgtccagcggtaaaaataaaaaagagatcctgaaagcgaccggatcaaccgttggtgtcaatcaagcaaactttgatgtatatgatggggagatatttgtcatcatgggtctatcggggagcggtaaatcaactttagtgcggctgttaaaccggcttattgaaccgactgccgggaatatctatattgatggtgacatgataacaaatatgtcaaaagaccagctccgggaagtgcgccggaaaaaaatcagcatggtctttcaaaaatttgcactgtttccgcacagaacgattcttgaaaatacggaatacggtttggagctccaaggcgttgacaaaaaagagcgtgagcaaaaagcgcttgattcgcttaaacttgtcggtcttgaaggctttgaacaccaattccctgatcagctcagcggaggaatgcagcagcgtgtcggccttgcccgcgcattgacgaatgatcctgacattcttctgatggatgaagctttcagtgcgcttgatccgctgatccgtaaagatatgcaggatgagcttttagaccttcatgactctgtcggcaaaacgattatcttcatcacgcatgaccttgatgaagcattgcgtatcggcgacagaatcgtgctgatgaaagacggtaacatcgttcagatcgggacacctgaagaaattctgatgagcccgtccaatgaatacgttgaaaaattcgttgaagacgttgatttatctaaagttctgacagcgggccacatcatgaagcgcgctgaaactgtgcggattgacaaagggcctcgtgtagcgctgcagctgatgaagaacttaggtatttcttccatctacgccgttgataaacaaaaaaagctactcggcgtcattcacgcggcggatgcgaaaaaagcggtcgaatccgacttatcgctgcaggatattttaaatactgaatttacgactgtgcacgaaagcacatacttgacggaaattttcgatgtggtgtctgatgcgaatatcccgatcgccgtcacggacgataaaggccgcatgaaaggcattgtcgtaaaaggcgcattaatcggcgcgctttcaggcaataacgattatataaatgttgaagattctgctgaacaagctcaggattcttctgttcaggaggtgaagtaaatggacagattgcctagaattccgttagcagatatcgttgaccggtttgttgactggcttactatgacgttcggaggtttctttgacggaatctcaaacggattggccgctttcgtaaacgcgattgtgagcgggttgggtttcatcccgtctattttattgactgtgatttttgcagctcttgcttggtggatcagtacgagaggaattgcactctttacgttaatcggattccttgttattgattatttgggctattggtcgccgatgctgcaaacattggcgcttgtcgtaacatctgttttgatttccattattattggggttccgattggcgtgtgggcgtctcagaaagaaacggtccgccgcattgtcacaccgattctcgatttaatgcagaccatgccggccttcgtatacctgctgcctgcgattttcttctttaatatcggcgttgtgccgggcgttgtggcatctgttattttcgcgatgcctccgacgatccgcatgacggttctcggtattaaacaagtcccggctgatctgattgaagcgacggaagcattcggttcaacgacgtctcagcgtctgttcaaggtacagcttccgcttgccacaaaaacaattcttgccggtattaaccaaagcatcatgctggcgttatcaatggtcgttatcgcggccatggtaggtgcgccgggtcttggttctgaagtatacagcgccgtgacacaattgaaaaccggtgtcggagtagaagcgggtattgcgatcgttatcgtcgcgattacgcttgaccgtattacgcaaaacattaaagtgaagaaaaagagcagggggaatgcctgatgcttaagaaaatcatcggtgtcggcgttaccgctgcgctggctctttctttggccgcctgcggttcgcagactgatggtcaagctacggctgcgtcccaggtgaacaaaaccattatcggtattgacccgggttcgggaatcatggccttaacggatgaggccgtgaaggattacggattgaaagactggaacgtcgtgacagcatcaagcgccgccatgaccgcgacattgaagaaatcatatgaccggaagaagccgatcatcgtaacgggctggacgccgcactggatgttctccagatataagctgaagttccttgatgatccgaaaaaaacgtacggaactgccgagcagattcatacgattacaagaaccggcttcagtaaggaacagcccaacgcggtcaaagttctcagccagttcaaatggacgcaggacgatatgggagaagtcatgattgccgttgaagaaggcgaaaagccggccaaagccgctgctgattatgtgaaaaaacataaagatcaagtggctcaatggacaaaaggcgctcataaagtaaaaggtgataaaatcaacctggcttatgtggcgtgggacagtgaaatcgccagtaccaatgtagtcggaaaggtattgcaagacctcggctatgacgtgaagctgacgcaagtggaggcaggcccgatgtggactgcggttgcgacaggcagcgcggatgcgtcattgtctgcttggctaccgaacacccataaagcttatgcgtctaaatataaaggcaaatatgaagatgtaggaacgagtctgacaggcgtcaagatgggtctggtcgttccccagtatatgaaaaacgtcaattcaattgaagatttgaagaagtaatgaagaaaagcagccccgtgccgggctgcttttttttatgtttcaaacgatgcgaggacggcggccgttaatatctcgacgccggtaaagatggcgcttcggtcaaatgtcatatggggatggtgaagccccggctgcagcccgcacccaagaccgagcatcgtcgttttcaagttcggcacctttaacccgtagaagtgaaaatcctcccctccggtcgtcactagaggctcatctacatgttcttctccgagaatgccgcttatcgcagccgccatgatggcttccgcttcttggttccgctcggctgccgggaggctgtgttctttttgcaattcgatttttgcgccgaatgcggcagccgccgcctcgcaggctctttctgtttcagcggtcagtttttccatggcggcattggtttgtgcgcggagatcaaggctgaaggatgcttttcccgggatgatattggaactctctccgcctgcctgaagctttgtcatcttcacggaatgcgggatgccgggatcaagatgaatgaagctcagcttttgcacgagaagggcggcgatttcgatactgttaagaccgagatgcggtcttgcgccgtgggcttcttctccgataatcaggccttcgatatgccggcttgagccatgaagaatggacggcgcgcatcggccgtttgccgtttcctgtacggggcgtacgtgcactccgtataagaagtcaacatcatcaagcactcctttttcaatcattttcagcgctccgccgcctttttcttcagccggctgaaaaataaagcggatggtgcccttcggaagcttccgctggcgctttaaaagcatcatcgtgccgagcgccatggtcatatgtgaatcatgtccgcatgagtggttcgcctgaaagacaccgtccacttcctgccacagcgcgtcaatatccgcccggacagccacgacgggtgaaccttctccgatttcgccgatcaccccggtacaatcatcaaacgtgcgggtccggcagcctgcttctttcagtttttcagtcagatattcagttgtttgatattctttccagcttacttcgggatgggcgtgcaggtggttaaaaatatccataatgacttgtttatcatgttctgtcagtctgttcatgccgtaagtcctccttcaaaagctgtctgtttttttatttttgatattgaaaacaggcaatcagtctgtatataatatagcacatatctgtattttctgaatagtttataaatttcaagcgggatggtgatgttatggctgtgccgaaagccgaacctgtattaaaaaagaagaaatcgtttgtgatgcccgatgcttacgttctgcttttcattgtcgctttactatgtgcgttagcgtcgtacatcgttcccgcgggggaattcgacagggtgacaaagggcagtgtgacgtcggccgtcccgggaagctatcatgctctggagcagtctccggtcagcccgatcgcttttttcaccgcgattcaggaagggatgacaagttccgcaccgattatctttttaatcctctttacagggggcaccattgcgattttggagaaaacgggcgccatcaatggattgatcaataatgtcatcagtacgttccgcacaaaacagctgctgtttattgcgattgtcggcgccttattttcgatcctcggcacaaccggcatcgtcgtcaattccgtaatcggttttatcccgatcggtctgatcgtcgcccgttcgctgaaatgggatgccgtggccggagcggccgtcatttatatcggctgttatgccggatttaacgcaacgatattatctccttcgccgctcgggttatcacaaagcatcgcggagctgccgctgttttctggtatcggccttcggattgccgtctatatttgttttctgctttcttctattttatatatatatcggtatacgagaaggctcaggaaatcaaaagacgccagcctgttggggaacgattggttcccggcggcaggttcagtcccgcaggtttctgagccggaggacaaacaagtctcgttcactgtccggcataagctgattctcgctgttgcggctttgtcgcttgctggttttttgtacggcgcgctcacccttggctggtctgattcagaaatggccgccgtgttcatttttatctcgatcttgtccggcctgattgcgggaatggcggcaaatgatatcgcaaaaacgtttatcacgggctgtcaggggctcgtttacggagcactgatcgtcggaatggcgagaagcatttccgttattttggaacatggaaagctgcttgatacggtagtcaatggactggcgtcactgctgcacggtttcagcccgatggcgggcgcaatcggaatgtatatttccagcgctctgcttcattttttgatctcatcagggtcgggggaggcggtcgtatttattccgatcttggcaccgcttgctgatctgatgggcatcacgagacaggttgcggttgaagcggtcatgcttggagaaggcgtcgtaaactgtgtcaatccgacttccggcgtgctgatggccgtattggctgcaagcggcattccgtacgtaaagtggcttcgttttatggtcccgctggcgctgatctggtttgtgatcggccttgtgtttatctgcataggcgtcctgatcaaatggggtccttactaaacattttgtcaatgatatttcggtttatcattatgaatcggcaagatataatgaagttgtaagccattcataaaagtacgggaggaagtcatcaatcagcgtaggaacagactttcaaacgtgaatggaaagagtgagagtgtgagagagaaagaacgaatgatttggtcagaagtcggaatgcttatgggcacactgtctttgcttgacatcatagtacgcggacttgtcctgaactgtccgtttagggaatgggccggaagcttggcggttttcttcattataatcgtttattattgcatcagagcagctgcatcggggattttgctgccggctattcattctgaagcagcattgaaaaaacaaatcagacggcaaatgggagaaacgcttgccgttgccgttatcattacgctgatcaccatgtatgaccaaggaatcccgcatcactttacaggatggctgaaattgattgcattatttctcgtatgcagcatcttcatatttctggtccgttatgttgcagtaaggctgatttatagaagatctcgcaaaaaaagctgacaaatgagccctgcttggtttcaagcagggacttgctttatatgttggccgattttgaccgtgcttttgcaatgtatgtatgagcggctaaatcatgtacactctgtgagcgatttttaaagagaaataaaaagtataacagcgggctcgcgcaatacacgaagatcgtaaaatagcggataaacgcctgcttaaaagaaatgttcccgcgggacttttcatcggcgacacgcagcctgaaaatgaacagtccgatcgttcctttcatttttgtaagcggcatcagcatcggatacagaataatcatcacaaattcagagatcagcacggcccacaaggcttcatcggtcagtttcgcgatatagaggatgactgatacaatgataatcacatctaacaggacagccggaatgcgataatagaactttccggcatcgggaagcggttcggatgactggacatccggtgatttcctgagaactgcggtgccggccgccatatcgtgaactgcctgcgctttttctgtaaagtgcaccgtaataaacggcagaacagagagaaagtgaagaagggaaacaaaaaatctgccgacagcctgcccgaatgaaattctgctcccatcatgcgcttttaccaccttcagtttaaagaggtaagcgccgatcgttccttcaagcggagtaagcggcatcaaaatatagcaaagcacaatcaagccggtaaaaatgaagaaaaaagaagtgctcagcggtctcccggcatataaggtgattggcacaagcagaatgaataggtacatgagcagaaggtcaaccaaaaaagccgccatccgttcacctatatttgcataattcatgattcattattctcctttcgtacagtaaaaagacaacaaatcacattttatagtcagatttccttttttagaataggtatttattccttattttctcttaaatgacattacaactattcatttattcctttcagttggaaagaataaaaaaataaaatttttctcttgcaaaagtttgtgaagtattgcacaatataaatgtgaaatacttcacaatataaaaacagacaccacgaaacactggaggatgagcatacatgatgaacgaacgagtgaacaaagtagcattaatcggagcaggttttgttggaagcagttatgcatttgcgctaattaaccaagggatcacggatgagcttgtgatcattgatgtaaataaagaaaaagccatgggagatgtcatggatttaaaccacggtaaggcatttgcgcctcatccggtaaaaacgtcttacggcacatatgaggattgcgaggatgccgatattgtgtgcatttgtgccggagccaaccaaaaaccgggcgaaacgagacttgagctggtcgaaaaaaacctcgccattttcaaaagcattgtcggtgaagtcatggcaagcggatttgacggcatcttcctcgttgccacaaacccggtcgatattcttacttatgcgacgtggaaattcagcggcctgccgaaagaacgcgtcatcggcagcggtacgacacttgattctgcgagattccgttatatgctgagtgaatacttcggcgccgccccgcaaaacgtacacgcccacattatcggcgagcacggagataccgagcttcctgtatggagccacgccaatatcggcggagtgccggtgcagcaattactggagaaaaatgcagcttacaagcaggacgagctggatcagatcgttgaagatgtgaaaaacgcggcctaccatattattgagaaaaaaggcgcgacatattacggagtggcgatgagcctcgcccgcatcacaaaagcgattttgcgtaatgaaaacagcattctaaccgtcagcacatatttggacgggcaatacggagtcaacgacgtctttatcggcattccggccatcgtcaatcggaacggcatcgccggtgtggcggaacttgagctgaatgaaacagaacaggctcaattcagccgcagcgcaaacgtgctgaaagatattctcgctccgcattttgcagagtaaacacaaaaaagcagtacatgacaaacgccatgtactgctttttttaattcgcttttttcgccatttcctgagaggttttcactctcgcttttcccatgaacaaaacggtaacggctgcaatgacgatcggcaccagagcaagagtaaatacatatgtgatgctttgagacattgcgtcaataattttatccagaatctgcggcggaatatgagcgcgcgtgccggcctggaagatttcctgaggatttccgatgttctgcatcgcgccgcccgctcctttcatgccgctgaaagaatctgtaagcttgttggtaaatacattcgtctggatggttccgaaaatcgtcacaccgagcgtcatgccgaatgatcttaagaacgagtttgttgagttggcgcttccgcggtagcgcggctcaaggtcattcatggacgctgccggcagcaatgagaagttgaagccgacgccgaatccggagatcagcatgaatactgtcagcatcgtacgcgccgtatccggagtcatattcgaaagcagcagcattccgataaagaaagcgaccacggaaatcagcattaaattacggaaccgcactttcgtttggaaaatcccgccgatcatacttccgataacagaaccgatcatcatcggcgtcaaaataaagcccgcgcttgtcgcggtgcttccgtacacagcctgaacgaaaatcgggataaacaccgccaaaatcacaaatgtggctccgtaaaggaaagccaaaatctgagcggtggcaaataaacggtttttaaacatccaaaatgaaataatcggttcttccgcttttctttccacaataaaaaaggcgataaagaacacggcgaacacagcgaacagaccgatgatctgaacagagttccaatcatacgtttttccgccgagctcaagagcgaacatcagaccgacaatggaaaccaccagcgtaatcgcaccggcccagtcgattttctgcttcttgtgctcaagtgattctttataataacgaagaatgaagaacagtgataaaatgccgatcggcacgttgatgtaaaacacccagtgccagctgatggagtcggtaatgagcgcgcctaaaagcggtccgagaacactggacagaccgaaaacggcaccgaacatacccgacatttttccgcgtttttccggcggaaataaatcaaaaataatcgtgaaggcgatcggcatcagcgcgcctccgccgattccctgaatgacgcggtaaataatgagctgatccattgtttgggcgattccgcataatgcagatccgattaagaaaagaataagaccgaataaaaagaaacgtttccgtccgtacatatcggacagttttccgtaaatcggcataccggccataacggctaccatgtatgatgccgtcacccacgcgaacttatcgaaacttccgaggtccgccacgatatttcccatcgcagtggcaacgattgtattatccatagccgacattaaaatgcccagcaaaagaccgatgacgacaaactttgtcgaggcgtccttcgcggctgtttgttccatgctttttcctcctatacttacttttgatcattaaatttgctatgatcatattagatttgccgaaaattatcttgatcgtcaagataaattgattttatagggaggcctgtcagttgtcaacaagaaataccagaagcgagacggaggaaaccgccatacagttattccggaagatggccacaaggacgatcctttttcatcaggcggccgctcaatctctcggtctgtttccgaccgatttgaaatcagctgatattttaaatgaagcaggcccgatgaccgcgggtgagcttgggaaaaaaaccggcctcagcacaggctcggtaacggcgctcattgaccggcttgaaaaagcgggatatgtcatgaggaaaaaagatcccgaagacaaacggcgggtgatcattgtgccgctgacagcgggaaaagcgaatgtgaagcaattgttcagctccttatcccagtccacggtcagcctttgccggcaatataaagaagaagaactgcatctgatattcgattttctcaaaaaagtgacggacattatggaagatgaacttgagaaattaaaataatatatcatagcccggcccattcatgaataatttgtacaagttgcatgaatgaggaggaagccaatgaacatctttttaagctacatcgttctcgggctgtcattgtcagcacctgtcggcccggtcaatgcggcgcaaattgacaaaggcatcaaaaacggcttttggcatgcatggattttcggtcttggcgccatggcggcagacgggctgtatatgattctgatttatttcgggctgtctcaatttttgacggctccatttgttaaaacgtttttgtggctcttcggttttttcgtgcttacctatacgggagtcgagacgttaaaaaatataagggaagccatgaatgtcagaagcggaaaaggaaaaccggcattttacaaaacattcggcgcggggttttttatttctctttccaatccgctgagcattttattttggctcggcatttacggcagcattctcgccaaaaccgctgaatccttcgatgcgaaccagcttttgatttacagctccgggattcttctcggcattttgatctgggatttctgtatggcgatcgccgcgagcactttcagaaatctccttcatgaaaaagcgcttcgctggctgacgggagcggcaggtgtgtccttgatcgtttttgggttttatttcggatggcaggggattcagatgctcatctcataaagagaagaacagtcactcatcgcctatctccatcataacgtatcatgacgatactggaggtgggcagatggcaagcgtgctgtacacaaaaagttgccttgaggaaaatttattgaatctgccaaattggcagaggatcgcttttgagctactatcagaaaaggtaggcgatgaagcggacacatttccgtgcattcccggccgtcagggatttctgacagatcagctccggatatccttcgcgggtgaccctcgtgatcgggaaaccccggaggaagtgggactgctgctgtccgagtacggaaagatctcaagggataccggaagatacgcgtcgctgcttgtgatttttgatacgccggaggatttagccgagcactgttccattgaggagtatgaagagctgttctggtctttcttaaagcggctgagcggctgcgacccgaaagactggccggaagacatgccggaagatcctgaacattataaatgggagttctgctttgacggcgagccgtattttattctgtgcgcaacgcctgcgcatgaagcgagacaaagcagaagctttccgttttttatgctggcgtttcagccaagatgggttttcgaaggattaaacgattcaaccgtgttcggacgcaatatgagccggctgatcagaaaacgattagaagcatatgacgaagcccctcttcatccccgattggggtggtacggaggaaaagacaatttagaatggaagcaatatttcctccgtgatgatgagacgcaagtgtcaaagtgtcccttttcttacttgaaaagattgtttaaaccgacgaaataagcaatgatccggcagggctgtgtccctgctttttttgtacgatccatgtcacgattgcaatgatggcgagaaaacaaaggctgaccagaaaaccgggccggcttgatttttcaaacagcgtgccggagacggccgcgatgatcagcaagagggcgataaaaatctgtgtggttcccatctttgtcggttcggtcagtttcttgcttgagaataaaatgaacagccacgtataaagaagcatcagacccgccgcggttgtcatgtgttcatatatatttttcggcagcaccaatgacagtatgatggagacgataagcccggcaaatgtcaatccgagcgcaggccagcagatctttttgttttcttttaatctgaagcatttcggcgcgtctccgtcatcagccattgtacagagcaatgtcgtcacggcaaacagcgaggcgacgagcgtagaaaatcccgcaataataaaaatcccgttaaaaatatcaagaatgacatctaaatgaaagcccttcagcgacgaaataaacgggctgtcctgttcggtgaatttggcgagcgggatcaacagcagcgccaggccgagagaaataacgtaaatcaccgcaagaacgatgagcatcagtctgcctgattttgaagcttcctccggctttttcagatgtacggtcatcagccccaagacttcaattcctccgaaagcgtaaaacgcataaatcagccccgtccataaccccatcgctccgtgcgggaacaaatcctttgtatcattcggcacctgcacatccgacttgtgtgaaaatataccgcacagcgccaagacggcgatgacgataaacataaaaatcgccgccgtttttacaacagcgagcacatgctccgttttttgaaaaacggacaaccccgtaaaaataatcaaaagaccgagcaccgcatagatggaggcgaagatccacagcggcacattcggaaaccaatgcttcgtaaacagcgagatcgctgtcagctggctccctgtgatcagcatttcggacgaccagtacacccacccgttgctgaagcctgcccaagagccgaaagcctttctcgcataagcgcaaaaagaccccttttcgggctgcttagccgaaagcttcgcgagctgctcaaagacaaaataggtgccgagtccggcaatcagaaatgagatcagcgcggaatatccgcttttgacaatagcgatactggacccgagaaagaagcccgtcccgattgtgcagccgacgccgattaaggagagctgccaccaagcgagatttcctttaggctggtcctgtgatttacccatgaaattcaacccctttatcaaagcttagattgcggccggcagaacgggaatatacatccaattaattgctttacatgaaacaaacggccggggttcataatagaagaaaaaaggagcagtctgatgccacagcaatttatcgtaccgccgaaaaaagggctcggcctgaaggttcacaaagggcagattataaaagtagtcgatgtggaaggacagcaggtggctgactttacggcctatcatgccaaggacttttatgagcatcttgatcagggcgcgacgattgatgccaaccagtccatcaatgtgaaaacgggcgatcatatttattctaatttatacaagccgatgctgacgctgattgaagatacagtcggcaagcatgacctgctgctccccgcctgccgcccggatatgaacaggcttttatacggaaagcataaagacgagctccaggatacgtgctatgacaatatgagcggggcgcttgagcaattcggggtgccgcggccgcatatgcattatcctttcgccattttcatgaacacggtgcttgatgagaaagggaacttgtcagtcgaaacgcccctgtccgacgcaggcgattatgtacggctccgtgcggaaatggatcttgtcgtcgcgttttcctcctgcccgattgaaaaaggaaaatgcaacggcgacagcatcactgcgctgcgggtggaaatcagctgatcccggtgtatttgattcacttaaaatctgcacctgtgctatatttaacagagtcgtacatagtggcatgattcatttccagcatgaacgggaaatgaatcaaaagaaacaatgcaggaggagtgattgggatgagcatccagaaacaaattatgaatgatctccatgtaaagccctcaattgatccgaaacaagaaattgaggacagagtgaactttctgaaacaatatttgaaaaaaacaggtgccaaaggctttgtgctcggcatcagcgggggccaggattccacgcttgcgggacgcctcgcccaaatggcggctgagagcatcagagaggaaggcggaaacgcggaatttatcgccgtacgtcttccgcacggcacacagcaggatgaggatgacgctcaaatggcgctcaaattcattaagcctgataaatcatggacgtatgatattaagcccgctgtcagcgcgttcgccgatcagtacaaaaaagaaaccggcgatcagctgtctgactttaacaaaggaaatgtaaaagcaagaatgagaatgatcgctcaatatgccgtcggcggacaagaggggctgcttgtcatcggaactgaccatgcggctgaggctgtgaccggcttcttcacgaaatacggtgatggcggagctgatctgctgccgcttacgggcctgacgaaacgccagggcagacgtttattagaagagctcggcgcgccggaacgcctgtatttaaaattaccgacggctgatctgctcgatgacaaaccgcagcagactgacgagaccgaacttggcatcacatacaatgacattgatgactatttagaaggcaaggacgtttcttctgaagtaattgaggcgctggaaaaacgctacctcagttcggagcataagcgccaggtgcctgcatcgatgtttgatgattggtggaaatagaaataaaaaacctcccttttgaaagggaggtttttatttcttatgaaagcagtgtttcatctcattcagagattctttaatatgcacttcagcatgacgaccgaagtattcgagtgacacgaatccgccgtattgcctgttcatcagttcattcagcaagggttcctgctgtaaatcaccttgcagcacaggcaccggcttgctgagataccagttgtcaaagttccaatgatagttttttaagtgaatatggctgacggtatgatacagtttttccaaagcggtcatttggtcaatgtgattgacgtgaaggttggagccgtcaaaaatgatgcggacccgcggatgtccgacatcctctaaaaatgccagcgccgcctccggtgtatccgcgtacgtatcgtaatgaatctcaagcccgatatcgacttcataactgtcagcgagccgtgccgcctcctgaaattgatcaaccgcacgctcccacttttccggtgacgtccggtgcgaagccagattgcccgcaaagactctgatcaaggggctgtgaagctgccgtgccgcgcttaatgctctttgaacatcttttaatgcctgcctttcatcctgagagacgaagtcagtgtacaagctgacagccggcacctcgatgccctcctcctgaagctgctgatcgagcctgtcgagcgggccgatttccttaatatattgtttgatgtggccgtaccacagttcgatgccgtcaaaggagtgctccttcgcgaaagaaatgacgtcgagaatatgcttttttttagaccccgtcgtgcaaaagctcagtttcatcggtaatcctcccgttaactgtctatcatatgtgtacttttccccgggtacgatacggataaacagatgaaaagggtaaacactttttttatgagggaggttcacctgcatcattcgcacataaatagtttagtgcttttttgcgtcaaagtattaaataattgcccgaagtgttgtacaatggatgtcattcgagtaagggggagaagccattgaaaaatgaaacggagctgacggacttcagtcccatccgcaataaaccgactcgcgctcgttatgtgatactggttcttttgttttttatcactgcgattaattatatagaccgtgccagtgtatccatcgccgccccgtccattcagacatcgctgcatataagccccgcgctcttgggcgtcgtattttccgcgttcagctggacctatacgggaatgcagattccgggcggactcattctggacaaattcgggtcaaaacggacgtacggaatttcattatttgtctggtcggttttcacgggagtacaggcttttgcagccagtttcggatttttattcggctgccgcctgattatcgggctggctgaatcgcctgcgtttcccgcaaacaaccggattgtcacgacgtggtttccaaggcgtgaacgcgcctttgcgacgggtgtttatacggcgggggaatatgtcgggctcgcattcgccacaccggtattattctggattttgacggcatttgactggcgcgccgtctttatttcttcgggggcgctcgggcttattttctccattttctggtttaagatgtatcaggagccgaaccggtatcggaaagtgaatcgggaggagcttgattatattaaagaaggaggcggactgacagaggtgtctgaatcagccggcaggatcacgtgggcggatttcgtccagcttcttaagtaccgcaagcttgtcggcttgtatatcggccaattcgccgtagcctccacgctgttcttctttttgacatggtttccgacttatctggcggaggcaaagcatatggccttcttaaaagtcggcttcgccgcatcaatcccgtatatcgctgccttcttcggcgtattgttcggcggattttggtctgacggcatgatgaaacggggcgtgtcggtgaacgttgcccggaaaacgcctgtcatcctcggtcttctgctgacaggcaccatcgttctcgcgaattttacggattcttctcctgcggttttgacgattctatccattgcttctttcgcgcagggcatgtccaatatatcctggacaatgctgagtgaggtggcgccgagcgagacaatcggattggcagggggcgtgtttaactttttcgccaatatggccggtatcatcacaccgcttatcatcgggtttatcgtctccgcgaccggttcatataacggagcgattctgtttgtcggcgctgtcgcttttatcggggcgttttcttatattttcattgtcggaaaggtcgaacgcattacgctccgatagaaagaaaaactcatctcttcttgttgaggatgggttttctttcattgattatctctatatttcaatattgaattatcatataataaacataactttttcattccttaggaggatttcgccgaagatgaacgcaaaacgtgccattcccgtaagagaaagaaatatcgtactgatcggattcatgggtgtcggaaagacaacaatcggccagctggtcgctaaaaaattatacagagatttcattgatattgatctgcagattgagaaagatttcaatatgtccattcccgaaatgtttgagaaaaagggtgaagcctttttcagacagactgaaaaggattatatattagatatttgccgcaatacgaaattcaagatcgtgtcgcttgggggcggttcgtttaaacaagaggaaatcaggcaatgctgccttgaaaactgtctcgtgctccatcttgatttgtcatgggagaattggaagcagcgggctgacctgctgattgaaagccgtccggttctgcataaccgttccatggaggaaatgcagcagctctttaacgagcgccaaagcatctatgataaacataattcaaaagtcgcgacggataatctggaacctgaagaaattgccgattatatcgtcgaaacgttaaaaatcggctgggacctgtatcagccgatgtaaaaagagccgtgacgctgtgagcgcacggccgtttttctattttaaacaaacgtttgataaaaagtgaatgcgcccgccgattatttataaaaatgtttagaaaataagtgtgaaatcgtgttaagatagagtcagaaaattaaatcttataaaacaaaggggaataatcggatatgcaattatacgacttgccgcttgaccaactgcaaacctataaaccaaataaaaccgcacctcatgactttgcggatttttgggcatcatcattacatgagcttgcaaaggaaaaggcaaagcctgaattgacgcctgaaagctatccggctgacggcgttaaagtattccggctgaaataccggagcttcggcaaggcggaaattgagggatggtacgccgttcccgaccgaaaaggaccgcatccggccatcgtgaaatatcacggctacaacgcgagctatgacggggacatccatgatatcgtgaattgggcgctgcacggatatgctgcgttcggcatgcttgtccgcggccagcacagcagcacagatacaagcgtctcaccgcacggacacgttcccggctggatgacgaaaggaattttagataaagatacatattattaccgcggagtgtacttggacgccgtacgggctctggaagtcatcagcggctttgacgaagtcgatgaaacgagaatcgccgttatcggcgggagtcagggaggcgggctttcaatcgccgcggcggcactatccgacattccgagagcggttgcagccgattatccttacttaagcaattttgagcgggcgattgatgtcgctcttgatgagccgtatcttgagattaactcctttttcagaaaaaacggcagcccggagacagagaagaccgcgatgaatacactggcctattttgatatcatgaatctggcagaccgcgtaaaggctccggttctcatgtccatcggactgattgaccgcgtgactccgccgtctacggtatttgccgcttacaatcatttagaaacagaaaaagaattgaaggtttaccggtatttcggccatgagtacataccttctttccatacggaaaagctggcctttctgaaagcgcatctgaaaggctgataaaagcgaaaagcccaagttttacatttgggcttttttcatgaatgatgacggaaaaggacggatacaaatgaaacaaaggatcatcgaagaattaaaacgaattgaggcacagcacgacgttaaggtgctttacgccgtagaatcgggaagccgcgcatggggatttccgtcaagcgacagcgactacgatgtacggtttctctatgtgccgaaaaaagaatggtacttttccattgaaccgcatagggatgtcatagaagagccgatccatgacatgcttgacatcagcggctgggaattgagaaaagcgctgcggctctttaaaaaatcaaatccgcctcttttggaatggctctcttctgagatgatctattacgaagctttctcggcggctgaaaagctccgaaaactgaaaacccgcgccttctcgcccgaagccggcatccatcattatctcaatatggcaaaacggaatgaaaaaacggaactgcggggcggtgaagtgaagattaaaaagtacttttatgtcctgcggcctctcctcgcctgcaggtggattgaaacgttcagctccgtgcctccgatgtcttttcccgtactggcggatgccctattgacggatgaatcgctcatttctgaaatcaattctttgcttacaaggaaaaaaagcggtcaggaactggctccggaacccaaaaatacgatcattcacgcgtttatagaagaggaaatagaacgcatcgggctatatgccaaaacgataaaaacgccgaaatccgatataacggaagaattgaatcagctattgattcagaccgtcgaagaggcgtgggagcaaaaagacggaaattgacgatttctgtcatttccgtccgccttttttcggcataaaccgcctgctctctaagaagctgattgtggtaaaaccacaaaaatttatcagaatctttgtatttttagaatattgtgagaggatgttttgtccatttacaatagactcatacaaatacttcttagattgcggggtgttaaggttggaagtgattacaagagattttttcttatttttgtccaagagcagctttctcaataagatggcgagaaactggggaagccgcgtggcagccggcaaaatcatcggaggaatggatttccgcagttctatcccgacaatccgacatttgaacagccaggggctgtctgttactgtcgatcatttaggggaatttgtcaacagcggtgatgttgcaaaggagcgcaccgaggagtgcatgcagaccatcgctttaatcgctgatgaacagctgaattcccaagtgtcattaaaaatgacgtctttaggtcttgatatagatctcgatctcgtctatgaaaatatgacgaaaatcctccagacagcggaaaaacataaagtcatggtgacgattgacatggaggatgaaacgagatgccagaaaacgctggatatctttaaagacttccgaagccggtatgaatacgtaagcaccgtggtacaggcttatctgtacagaacggagaaggatcttgatgaccttggcccgctgaacccgtttctgcgccttgtcaaaggagcctataaagaatcggaaaaggtggcctatcctgaaaaaagcgacgtagatgaaaattataaaaaactcatccgcaaacagcttttaaaaggacattatacggcaattgccacgcatgacgacaagatgatcgattttacaaagcagcttgtcaaagagcacggcattccgaacgaccgctttgagtttcagatgctgtacggcatgcgctcgcaaacccagctcagccttgtggaagaaggatacaacatgagagtctacctgccttacggcgatgactggtacggctatttcatgagacggctcgctgaacgcccctcaaacatcgcattcgcctttaaaggaatgacaaagaagtaaaaaaagggagagatgacaatgactacaccttataaacacgaaccattcacgaatttccaagatcaatcaaacgttgaagaattcaagaaagcgcttgcgactgtaaacgaatatctgggaaaagattatccgctcgtcatcaacggtgaaaaagtagagacggaagcaaaaatcgtatccattaaccctgcagacaaagaagaagtcgtcggaaaagtgtcaaaggcatctcaggagcatgccgagcaggcaatcgaagcagccgctaaagcgtttgaggaatggagatacacatcccctgaggaaagagcggccgttctgttccgcgcggctgccaaagtccgccgcagaaagcacgaattctccgccctgctcgtcaaggaagcgggaaagccttggaacgaagctgatgcggatacggcggaagccatcgactttatggaatactacgcgcgccagatggttgaattggcaaaaggcaagccggtcaacagccgcgaaggcgaaaagaaccaatatgtctacacaccgacaggcgtaacggtcgtcattccgccatggaacttcctctttgcaattatggcgggaacgacagtggcaccgattgtaacgggcaacacggtcgttcttaaaccggcaagcgcgacacctgtcatcgcggcaaaattcgtagaagtgcttgaagaatcaggccttccgaagggcgttgtcaactttgtgccgggaagcggagcggaagtgggagactatctcgtcgatcacccgaaaacaagcatcattacgtttacgggatcacgtgaagtcggtacgagaattttcgaacgcgcggcaaaagtgcagccggggcagcagcatctgaaacgcgtcattgctgaaatgggcggtaaagatacggttgttgttgacgaggatgcggacattgaattggcggcacaatccattttcacatcagcattcggctttgcgggacaaaaatgttctgccggatcccgtgcggttgtgcatgaaaaagtatacgatgccgttcttgagcgtgtcatcgaaatcactgaatcaaaagtgacggcaagccctgacagcgctgacgtgtatatgggccctgtcatcgaccaaggctcttacgacaaaatcatgagctacattgaaatcggaaaagaagaaggccgtttagtcagcggcggcaccggagatgattcaaaaggctacttcatcaagccgacgatcttcgctgaccttgatccgaaagccagactcatgcaggaagagattttcggtccggtcgtcgcgttttctaaagtgtcaaactttgatgaagcgctggaagtggcaaacaataccgaatatggtttgacaggagcggttatcacaaacaaccgcaaacatattgaacgggcgaaacaggagttccatgtcggcaacctgtacttcaaccgcaattgtacgggagcgattgtcggctaccatccgttcggaggcttcaaaatgtccggaacggattcaaaagcgggcggcccggattacttggcccttcacatgcaggcgaaaacaatcagtgaaatgttttaagcgggactgaatgggcacctcctcgcggggggtgtccatttcaccataaacatataaaacggaggaggaaatgccatagcaaacattcagttgattatttccatttgtatttatatggcgggaatgctgtttatcggttattacgcctacagacggacgtcaaatctgacggattatatgctcggggggcgttctttaggccctgccgtgacagcgctcagcgcgggagcggcggatatgagcggatggctcttaatggggcttccgggcgccatgttttcaacggggctaagcggcgcttggattgtcatcggacttgtgctcggagcatgggcgaactggcttttcgtggcaccgagactgagaacgtataccgaaaaagcgggaaattccattaccattccgggtttccttgaaaatcgtttcggcgatcacacgaagcttctcaggctgttttcgggtcttgtcattctcgtttttttcacattttacgtatcatccggcatggtatccggaggcgtcttattcaaaagcattttaggattgaattaccacacggggctgtgggtcgtgacaggcgtcgttgtcgcctacaccttgttcggaggctttttggcggtaagctggacggactttgtccaagggatcattatgtttgcggcgcttattctcgtgccgattgtgacaatttttcatacgggcggcccgggagaaaccgttgccgatatccgttcagtcaacccggaactgtttaatatgttcaaaggaacgaccgttctaggcattatttctttatttgcgtgggggctcggctatttcggtcagccgcatattattgtgcgctttatggcgatcacatctgtgaaagagatcaaacgcgccagacggatcggaatgggatggatgattttatctgcactcggcgctctgtttacggggctcgcgggaatcgcgtattaccatcagcgcggattgaagctggctgatccggaaaccatttttattcagctcggcaatattctgttccacccgattattacgggatttctcatttctgcgattttggctgccattatgagtacgatttcgtctcagctgctcgttacgtccagttctttagtggaagacttgtataaatccatgttcaggcgttcggcttctgataaggaactcgtatttctggggagaatggcagtacttgcggtgtccatcatcgcattggtgctcgcatgggagaaaaacaacacgatacttggccttgtcagctatgcatgggcgggattcggcgcttcattcgggccggtcgtactgctcagtttattttggaaacggatgacgaaatggggggcactcgccggcatgattgcgggagcgattaccgtaatcatttgggcgaatgccggtctttcaggctttttgtacgaaatcattccgggctttgctgtaagccttgctgctgtatttgtcgtcagcttattgacacaggctccgtcaaaagatgtcacagatcagtttcatgagtaccgtgatacactttctcaataaaagcaaagaacgagaggaagaagggaccgccctttttcctcttttcatgatacaggcctccggataatactattttgggaatatatgaatttttttctatacaaaaagtcaccccgcagagtatgataaagataaaaagagcataggagaaataggtatggaagagcttttagagagagttttttcatttacggacattgataaattaattgatttcatcagttatgaattgcagaagcccgtcattctggaaagcgcggatttctttttgcttgcctataattcttattacattaatcacttcgactccgccaaccagcagacgatcttctcaaaaaaatgccccgtgcagatttttgaaaggtttctgaaggacggggtaatcgaaaaactgaaaaccgttcctgaaccgttccgtgttgaaaaaatagacagtatcggcctgaatcagagagtggttgtaagcgctaaacataaaggggaagtgatgggttacatctggattcaggagctcgaccgcaacctgacggacgaagagctcaactttttatatgaaacatcatttcatgtcgggaaaatcatccataaaacgaaccgggtgaaacaggaaaaggaagagagagcggaagaccttgtgaagcgggcgatttttcagcaattctcctctgaaaaggagttcaggcgggaggcagaaaagatgaacgccgtgctgccgtcggtcttttcagtagtcgtcctccatgccgcaaatggagatggggaggcagtcgaagatgtgaaggaaaatatcaaatcgtacttgaatttgcgagataaagtgagtcatgttttaaccatcgattccaatattgtcatcgtcgtcgcaagcttctcgcaaaaaagctccggcacttcggcagcatctgaattcatccacaaactgctgactcattttcactttcagaagatccccactccaatttatatcggaatcggcaatgaatacagcagcatcctgaagctcggcaaaagttatatagaagcccttgaagttataaaggctgccgaaattaccgggaaccaggaaaatatcccgtatgaatacagtaagctcgggatttaccgttatcttgaaagcatcgaagaaaaaaacgcctcactggaatatgtaaactatgatttagctttattaaaagccaaagacagagaaagcagtaccgaactgctgaaaacattagaaatctatctcctcaataactgcaaaacaaaaccagccgcagaacagctttttattcatcaaaacacattgaactaccgtatcaaacagattcttgacatgacttcaattgatttaaacgacttcagaacaaggtgtcagctgtatctcgatattatgctgatgaaaaagaaatagaaaagaaaccagtcgccgtactggtttcagctttaatccctcccgcctgtcaactctcactgaaccgcgcttgtgaatctctccttttccgtgatgagaaatgaataaacaccgctccccgatgtatgttatactttttattgatattgattctcaattaaaactttttaagtatagatataaacgggaggcagaataatggcggaaaatcatgaggtgtatgacgtcacgattataggcggaggcccggtcggcctgtttgcggctttttattgcgggatgcgcgagctgaaaacgaaggtgatcgagtttttgccgcggctcggagggaaagtgtctatgtttttccctgaaaaaatcatccgtgacatcggcggaataccggggatcaccggggaacagctgattaagcagttgaaggagcaggcggcgacatttgagccggatatcgtgttgaatcagcgggtgaccggatttgaacggctggaggacggaaccattgtgctggaaagtgccgaaggggaaaagcactatacacgcaccgtgatcttggcggtcggcatggggacgctggaggtcaatgaacttaacagtgcggatgcgagccgatattcagggaagaaccttcattataaagtggagaagctggatgcgtttcaaggtaagcatgtcgtgatttccggagggggagataccgcggttgactgggcgaatgagctggaaccgattgcggcgtctgttaccgttttgcaccgccgtgaggagttcggcggcttggaaagcagcgtcgcgaaaatgaagcggtcttccgtgcgggtgcttgcgccgtatcgtttgaagcatattaacggcacaggagaacggatcgaaagcgtcaccgtttgccaaactgagtccggcctttctgaagacatcaagcttgatgagctcattatcaaccacgggtttaaaattgatctcggtgcgatgaaggattgggggcttgagattgaagaaggcagaattaaagctgacagacatatgcggacgaaccttccgggggtgtttgttgccggtgacgctgcgtattatgaaagcaaactcagattgatagccggcggtttcactgaggggccgaccgccgtcaacagcgccaaagcatatttggacccgcaggcggatcatatggcgatgtattcaactcatcataaaaaattggtgacacaataaaaagggactgacctccgctgttgggccgggggtcagataaagcgcatcagctgtgaaggagcacttctttcatttcatttcgtataaacgcaaataattgttcctgatttttcacggcggtaaatccgtaaccggcgggcacgtcttcgcccatgcagacgacaggagggcggtttgccgacgggttcggtgatatgccgatctcttttcccgcgctgatcaaatgctgagcggcttctttgtccggacagataatcatttgcagaggggactcactgatcgtgcgttcgatcatggaagtgaaccgctcatctgcaatatgttcatgggtgacataaaacgggcatgattctgagtctggcatgtttactgccgcttgacggctccttacaatgagtgaatgcggagaatcactttgatattctgataggaggaagccccgtttttcaagttccttctgtgccgcttcagtcgctgcattcaggtttgcggtcacccggcggatgtcgatttggttgaaagccaatgtgtcaaagaattcacagacggcaaggcgtgatgtgaaaaagatatgttcaaaggtgccgatctgttttaggatggtttcgttgaccggcatttttttaatgatccgcttcggccattcgataacatcggcgccatactcccgcagcttgtctgtcaatgtatgttcagcatcgccatgggtgaccaccatgatatgccggccgatgaacggtttgctttcaaaccagctatgtgtttgaaaattcacgatatctccgatgacaataatggcagggttggtgattttacggctttgtactttttcatggatatcgtgaagcgttccttttatgctccgctgccgcccccatgttccccattgaatgacgagtacagggacggaaggggattttccgtactccataagcttccggcatataaatgacagatttttaacgcccatgtaaaacacaagcgtttgaacgcttctggcaagcccttcccagtcaagattcggcctgccttgtaatgatttatcatgagcggtaatcatggcgaaggacgaagcgaaatcacgatgggtgacagggactcccgcatacatcggcgctgcgattcccgaggtgatgccgggcaccatttcgtagcggatgccgtgctgatgaagcgcctctgcttcttcgccgactctgccgaacacacttggatctccgcctttcaagcggactacggtgaagccctccgccgctttttcaatcagcagggcattgatctccgactgtttcataaaatggcggtcgggcagctttccgcaatagatgaaccggcattccggtgaggcatattcaagaaactttgggtttgcgagccggtcatacaaaatgatctccgctttctccagagcctgttttccttttacggtgatcagccccgggtctccgggtcctgcaccgacaaaatatacgattccgtttttcatgatggcttcatcccttcacaatttaaaaaatgaaggaccacttgaaaaagtgatccggttctttgatcaatacaggaggtatacattctctccttcgatcaatgtatcgtatgttttgatacagccatgatccggctcttggacttttccgtcttctaaggagattttccagtcatgcatcgggcagaaaacgtattctccgctgatgatgccttcagccaggacgccgcctttatgaggacagcggttttccacggctcggacgcttccgtcggaaagcttaaatacggcaagctctttatcttctacatatacggtttttcctaatttctcaggtaattcgtttaatctgcctatgcaaacctttgtcatatctttattaaccatgtccgttccccctcactgtttgttctgtctttatgaagtcgtgacgacattttcgaataaatctttagaagcttttttatcattaaggaagtattgccacggatctttatggacagagagtgtctcattcattctgtcattgagctcctgccgtttttccggatcgtttaacacggattggacatgagataaaccgacgcgctccagccatgcggatgtacgctccagatagtttgccgtttctctgtagtactgaaggtaagcaccagcgtattctaagacttcttcatttgttttcactttcatcagcaaatcaccggcgcgcaaatgagttccgccgttcccgccgacataaagctcccagccgccgtcgatgccgacgacgccaaggtctttaataccggactccgcacagttccgcgggcaggcagacacggccattttgactttatgaggtgtattgagcccttcgaattttttctccagcgcaatgcccagtgccatggagtcttgcgtgccgaagcggcagaattgttcgcctacgcacgtttttaccgtgcggagcgtttttccgtacgcgtagcctgacggcatatcaagctcggcccatactttcggaagatcttcttttttcacgccgatgagatcaattcgctggccgccggtcattttcacgagcgggatttcgtatttgtcgacgacatcggcgatcttgcgaagatctgtggaattggtcacaccgccgtacatccggggaacgacggagtatgttccgtctttttgaatattggcgtgcatccgttcgttcacaaatcgggaagttctgtcatcctcgtacgtagccggattgatcatgcctaagtagtagttgagggcaggccggcatttggagcagccttccggcgttttccagccgagcacgttcatgatttctctcgtatgtgacagccctttggctttgatttcttctacgacttcatctctcgacaatgaggtgcagccgcaaatcgcttctttttgcgcggatgcgtcaaattctgatcccagtgtgtattgaagaatgtcttcaacgagcggtttacagcctccgcatgagcgggatgccccggtgcatgctttgatttcgtccgtggatgtgcagcctttttcctgaatggcttgaataatcgcgccctttgatacgccgttgcagccgcagatgatttcatcgtcgctcatcgccgcggtcatacttgtacctgcttcctgatcaagaggctgtaaaattgatattttggaggtttcggagatatcggcttctttttgaatcattgaaaacaggcggccgccctcgctgctgtcgccgaataaaacagcaccgacaatttgatttcctctcaggacgatttttttatagatgccatcctgttcatcgaacactttaatcgcttttttgtcctctgattcgttaaagtcaccggcagagaacacctcgacacctgatacctttaattgagtggagagaacggaaccttcatacggttttgtttcgatgccgcaaatatgctttgcgagcactttcgcctgttcatagagcggcgccacaagtccgtatgcgattccgcggtgctcggcacattcgccgaccgcgtaaatgtgcgggatttcagtttgcatataatcattgacaatgatgccgcggttaaccggaatgccgctttctgcgccaagctgtgtattcgggcggatgccgacggccatgacgactaaatcagcttcaatgattgtgccgtctttaaagcgtacgccttcaacactgtcagtgccgaggatttcttcagtttgcttttcaagtaaaaaggtcatgccctgtttttctaattcgttttgcagcaggcgtcctgccgctgcatcaagctggcgttccatcaggaatggggcgaggtggatgacggacacgtccatgccgagattcagcagtccccgcgcggcttccaaacccagcagtcctccgccgatgacggctgcttttttatattgttttgacgcggcgagcatcgtgtctgtatctttaatatcccggaaagcagtgacaccttgtttatccgcgcccggaatcggtaggataaaaggtacggagcctgtcgccaggatgagttcatcgtaaggctggattctgtctgcatctgtgatgacggttttgctttccgggttcactttgatgactgtttcaccggtatgcagctgaatgttgttttctttgtaccagtcccaatcgtttaacgtaatatctttaatatctgtatcgccttgcagcacttttgacagaaggattcggttatagttgggatgaggttcggccccgaatatcgtaatctcgaattcgtcttttgaaacatgcagtatttcttcaattgctcttaccccggccattccatttccaacaaggactagctgtttttttcccatcagatgatccgctccttatctatgttttttttagcgtagcacagcaaaaacaaatatttaagatgcatgttatgaaatgtaacaaaaaatacgaaaaaatctaaaaattttatgaaaaattatatggggctgattcgtacggcgcacatcttaaaaccgggcattttacaatctgctgtttatcggaatgatggcgctcggcatgggtaacggagcggtatttcagcttgtcccgcagcactttagaaaagaaatcggaatggtgacgggaatcgtcggggcggccggcggcataggcggtttttttcttcccaatattttagggtcattaaagcaggtgacgggatcttatgctatcggctttatctctttttcatgtatcgcattgcttgcgtttgtgcttgttctcgcagcaggttattattggagaaaaagctatggcactgaaagcagccatgcggatgtttaagtttgagcggaagacacgtgtgacagcgtgtctttttcatgatgtataacttttacttgattttaaacggagaatacagcagaataaatagtaacgattgcgatttaaactgatgtacataataattgaaaagagacgggtatgtatcataaatcgtaatcattctattttatcaggaggatatgttcatgaaaaaaattccggttacagtattaagcggctatcttggtgctggaaagacgactgttttgaatcatattttacaaaatcgcaacggtttaaaaattgctgtcatcgtcaatgacatgagcgaagtaaacatagacgccggcttggtgaagcagggaggcggcttatcacggacagatgagaaacttgtggaattatccaacggctgtatctgctgcacgctgcgtgaggatctattagtcgaggtcgagaaactcgccaaagacggcaggtttgattacatcgtaattgaatcaacagggatcagcgaaccgattcccgttgcccaaacattttcttacatagatgaagaaatgggcattgatctgacagccttctgcaagctggacacaatggtgactgtggtggatgcaaaccgcttctggcatgatttccagtccggtgacagcctccttgaccgtaaggaagcggcgggagaagaggatgaacgagagattgctgatctattaattgatcaaatcgagttttgtgacgttctcattttaaataagcgcgacatggtgggcgaaaaagagcttgaacagcttgaaacagttcttcgtgcattacagccccgggccaagctgatccgatccgtccgcggagaggtgtctcccgaatgcatattaaataccggtttatttgagtttgaggaggcaagttcatctgcaggatggataaaggagctgacggcaggtcatgaggcgcacactccggaaacggaagagtacggaatcacttcgtttgtgtactcgcggcgtctgccgtttcataccgctcgttttgacagctggctgcatcaatcaatgcctgacaacattgtacgcgcaaaaggaattgcatggtgcgcaacccgcaacagccttgcgctgctgatgtctcaggcaggtccggcagtctcgattgagcctgtttcttattgggtggcggcgatgccgaaacttgagcaggagcagatcaaacagcaggaaccggaaattctggaggattgggacgctcaattcggagaccgccatacgaatctggtgtttatcggaactgatttagatcaagcagccatcacaaaggaattagatcagtgtctgctgacaccgtctgagttcgattctgactggtcgcagcttgaagatccttttcaatgggacattcagcgggctgaataacataccggccaagtttagaagcgggtgagaagggaaggagtgatgaaaaaggagctgaccaatgtgaaagcactgacataccaagggaaagaacatatggaagtgaaagaagtcccggcaccctccattcaagacgagagagatgtcatcgttcgaatcaccgcaaccgggatttgcggttcagatcttcatttatataaaaacggaatccccgccgatccgggttatatcgtcggacatgagccgatgggaatcgttgaagaaacgggcagtcaagtcaaaaggctgaaaaaaggcgaccgcgtcgtgatcccttttaacatcggctgcggtgaatgtcattattgcaagcaccagatggaaagccagtgtgatgaatcaaacccaaaccctcatacagatgccggcggcttattcggtttctcggagtttaacggtaattatcccggcgggcaggctgaatatttgcgtgttccttttgctgatttctcttcttttctggttccggcagacagcgggcttgaagatgagcaggtgctgcttctgtcagatgtcatgccgaccgccttttggagcgtccagcacagcggagtgaaaaaaggagacacagtcgttattctggggtccgggccgatcggtttaatggcgcaaaaattcgcttggaaaaaaggagcaaaacgggtcatcgcagtcgatcaagtcccgcaccgtcttgaacatgcgcgacgcacaaacggagcagagaccttcaatttttcagaacatgatgagatcggaaaactgctgcatgagcaaacgtcagggggcgcggatgttgtgattgattgtgtcggaatggacggtacgccgctttcaaaagaaaaagcagagcaaaagccgaatcagttcggaaccatcagtccgattcttacagcgtcagaagccgttaagaagttcggaacagttcagctcacaggcgcatatatttctgaagcggacggttttccgctcggtgattttttcacccgcaacgtctctttaaaaatggggcaggcacccgttatccatctgatgccgatgctgtatcaaatggtcgaacaaaatgaaattgatccgacggatatcattacgcataaaatgagtcttgcggaagcccctgctgcatatgatatatttgacaaaaaagaagatggcaatattaaagtgattttgaagccatagcgaggggaaacacaatgaatatttacagaccggcaggattttggatcagattgggagccttagtactcgactatttaattacttcagtgcctctggcgattatttttatgctggcaacaggaaaagatccgaatgatagcacaatgatcagcatcattttgactctttattctcttttgctcccagtttactggaacggttacgttatcggcaaaaagatttgcggtatccgcattgtcaaaaaagacggcactcaggtaggctttcttactatgattttaagagtgcttgtgggcgctttaatatatggcgtgacgtttggaatcggtgtgatcgtgagcgccttcatggtcggaatgagagaagacaaacggtcaatccacgattttgtagcaggaacgtatgtcacatacgcgctgccggatgaatcgattgaaaagagcgaataatttcgctctttttttttgcataaaaactggatgaaggcacaacatattacaaacgttaaaggaggaaagagtcatgaaaaaagctgcgttatcattggctgcgtttttcattacggcaatggttttcacaatgccggcacacgccgctgaaacgaaaatgccttcaacaatgtcacttacgcaacagcagaaaaaagaaattgaatcacttgaaaaagaaatactcgaaaaacgcaaacatgtcatttccaaatatgttgagtacggcgtcctgccgaaagaaaaagcagagcatattaaacagcatatggacaggcactttaatatgatgaaacaaaacggctttattccaaagcctccccctcataaactggaaaaacggcatcatcattcttaagcatccggcaagtcggatgcttttttgtttttatcgggattgctttgaaacgcgtttcataacgtatgatattaatatcatacgcatcaggaggatgaaaacacatgatacatgaaaaaccgggtcttttccctgatacatttctatgggggtcagcttcagctgcctatcaggttgaaggagcctggaatacagacggtaaaggcccttcagtatgggactttttcacaaaaataccgggtaaaacatttaaaggctcaaacggtgatacagcagtcggccattatgaacgttataaagaagatatcgccttgatggcagagatgggtttgaaagcttatcgcttttctgtcagctggccgagaatttttccgaaaggcagaggggaaatcaacgaagcagggatcgcattttatgaaaacttgatcgatgaattgatttctaacaatattgagccggtgctgactctctatcattgggacttgcctcaggcgctgatggatgagtacggcggatttgaatcaaggaaaataattgatgattttaataattactgcgttgcgttatacaaaagattcgccggaaaggtgaagtactgggtcacgttaaatgagcagaattataattttcataacggattcattacagcttcacatccacccggtgtaaaggacagaaaacgattttatgaagcgaatcatatcgcatttttagctaatgccaaagcaattgaatccttcagaaaatatgttcctgacggcttgatcggcccgagcttcgcatattcaccggcttatccgctgacaagtcaccctgaagacataactgcatttgaaaacgcagaggaatttatgaatcattggtggcttgatatgtactgctgggggacttatccgcaaattcctttcagctatttaaaggaaaagggctgggcgcctgccattgaagccggcgatatggagctgctggcaaaaggcaagccggatttcatcggtgttaattattatcagacgattacgtatgaaagaaatcctcttgatggtgtatcggaggggaaaatgaacacgacggggcagaaagggacaaaccaggacacaggtataccgggactgtttaaaacgaaaaagaatcctgatcttgtgacgagcaattgggattggacgattgacccgacaggcctgcgcatcggcctccggcgtataacgagtaggtatcagcttccggtttttgttacagaaaacgggctgggggaattcgataaaatagaagaagacggctcgattcaggatgactacagaatcgactatttacgctcccatcttgaacagtgcagagaggccatcagtgacggagttaatctcatcggctactgcagctggtcatttacggatctgttaagctggctgaacggctatcaaaagcgctacggctttgtatatatcaatcgtgatgaagaagacgaaaaggatctgaaacggatcaggaaaaaaagtttttattggtatcagaatgtaattgaaacaaacggtaagagtttataaaagttccctgagagaaatatgattctctcagggatttcttttacattgcggccgcatcaataatatacgtatctgcatgaagatcggatatttcggcaggcactgaataacaggtaaggctgtatcggcctttcggaagatcgaagaaaagcctttttgacatcacgctttcaatttcaatcccatcttttacagcctcgaagggaacagtcgcttttttctcataggatggcaccggctcatttgtgttcagcctcaggacgataaatgccttcgtatttctccctgcttcaaatgaaacagcatcgtcagcctccgcgtatcctttttcaatggcttcatcggtccaatcgataacaggcggttctgaatctttttggaagattgtaaattgatgataagaaatggtcagttcttgcggtttccatgatttaatcaatgcgctgttcctcctgttttttacttgattttaaataatactctcgttccgtctggatcattggtaagctggtgtccgacccaagagccggctccgcggttgtctgccggagaaatatattctacggaggcattatttccgccctgtttacaaaccgccatcggccattcatccctatcgtatcctgtttttacaggcacatgtttaagagattgttcacgccgcttatgtactccgtctctgtcaatggtgcatatgctggaatgtccttcttttatcgcgtccttaatatgctttgctgtttccggatatcgatcggacggaaataggattaccttgtcgtaatcactcttctgaacggtctgctcgttatctgagaaaatatcacccttgatcagggccgcgactgctccggcaatgatgataagaacaagcagcagtgcttttaatgttttcaagagtatcaatcacctccagttttaaattgctgtgaagctggtccaagaataaagcagaatcgtcccgctgtaaagctgttaaaatatatttttcagccgcaattctgctgaatatctgtaaaaccgtccgtacaaatccgctttatccaataaaaaaccgatcagaaagtgttttttgccgtttctctattcagaaatgaatgattgcggccgtctgaataattggctattatagcgataagctcaccggcagggtaattcgtcggcgagtttccgccccgtgacggtttgtaattctgcgcgacggaacgataaaaagacggccatcttataagaaggccgtcagcatgtcattccagattcgcatgttttgtaaacatatctgccgaattcagttcttttttctccatgatttttaggataaccgcatcataaaacagcagaagagtttgttcgaataaagaacccatcggctgaatcgtctttctgtctccgtctgtctcttccttaggagagcctgggatcgttatcgtgagatccgcaagtttgccgagactcgaggcggggttaatcgttaatgcagtgatgatgccgttaaggcttttggctttttcggctgtgtggaggagactttttgtttctcctgagccggagccgatgatgacgagaccgccttcttggaggggaggggtaagcgtctcaccgacaatgtaagcgttcagtccgatatgcatcatcctcatggcgaacgctttagccataaaaccggaacggccggctccggatgtgaagatctgatctgccgataaaatctgctccgcaagcttgtcagcttcactgtcggctattaatgatgcggtacgggataattcattcaggatgtcatgtaagtattcagtcgttttcatgatccttgtgtgatcagctgtttcatttttgaagcagcatccgctttatcgtcagcgcccgtaatccctccgccaacaatgattaaatccgggttttgtttgatggcttcaggaagcgtatcaagtttaatgcctccggcaattgcggtttttgtgttcttgaccgcttttttaatcgccgtcagttccccgaatgaattttttccttctgcttgaagatcataacctgtgtgaacacaaatataatcaacaccgagttggtcaatttctgttgcccgtgtttcaaggtcttttacgttaatcatatcgacgaggatttttttctgctgcttttttgcttcagaaaccgcccctttgatcgttgagtcatctgttgcccctaaaacggtgatgatgtcggctcccgcttctgccgctttcataatctcgtaaccgcccgcatccatgattttaagatcagcaagcactttcagatgaggaaaggcctccttcatttgctgtacggctctcagtccttcattaatgacaaccggagtgccgatttcaacaacatctatatattgttcgacctctttcacaagttcaattgcttcaggaatattcactaagtctaatgcgagctgtaattccactttatatccactcctcttcttaatgtatttacattctatagagcgtcccgcatgttgagaagtacgcactttgaagtctaatagttaccttgaggatactgtccccgcaggcaatgcgctttgtttcagcaaaactgcgtggtagtataaactgatgaaagctctgtgaaaaagtaagtgtgtattaatagatgatgaacatacgaaaagtcagaggaaggagagttgtccgtgagccgaatggataagaagacgtttaattgcgaaaaggaattgacgcttgccgtgataggcgggaagtggaaaatgctgattatgtggcacttggggaaagaaggaacgaagcggtttaatgagctgaaagctttaattcctgatattacgcacaaaattcttgtgaatcagctcagggagctggagcaggatctgatcgttcacagggaagtttaccctgtcgtccctccgaaagtggagtactctttaacggcgcaaggagagagccttatgccgattctggacgccatgtataagtggggaaaagaatatatggaattaatcaacattgataaaactgcaattaaggaatctttttgaagcgctctatgtaaaatagagtgcttttttttgcgggttaatgaaatcatattgcgaacggttgaacctcctgtttcggttcttgcgctttttttcttgtatcggcttacatatgttaacttttttcattctgccataatgggatattcggcagattttatactatagtttaaagatttttaattttacgtaaataatattttttgaaaataaattgcgggatgccgcaaaaatccctctggatttgtcggaatttttttcggtgtgccgcatgaaacttttcacccgtttttcggtgataaaaacaatattttcatataaagtgaacgtaagtagatatatagaaattcatgaagaaataggtaaacctttcgtgcttacaatcttgacttttgtctggatttcccataatttgatgccgaaatttcggtctttacaagtaatggatgacggatttcggcggtgttttgaatcgggatgttttggaggtaagtggttcttttggcttgagaatgagttagggacattgagggaggctgtttctaaggaagaattgacaattttatcttaaaaagggaggcgtacacatatgggaataactttttatcctttaacaaatgctcaaaaacgtatctggtatacagagaaattctatccgcacacaagtatttcaaaccttgccggcttcgggaaactcatttctgaagacggggtacaagcccatttcgttgagaaagcgatacaggaattcgtccggcggcatgagtcgatgagaatccgtcttcggcttgatgatgagggggagcccgttcaatatgtgagcgaataccgtccgctgactatcaagcatacagatatcaggcaagccggttgctctgcggacgagctgtcaaaatgggggcgtgacgaggcaagcaagcctctggcgttatatgatcaggatttgtttcgtttttccgtgcacaccatcagcgaaaaagaggtttggttctatgttaatgtgcatcacgttatttcagacggaatttccatgacgattctgggcaatacgattaccgatatttatttggagctttcgggcggagcaagtgagaacgaggcggagattccttcctttatcgagcacgtgctgacagagcaggaatatgtgcagtcgaagcggttcaaaaaggatcgggatttttggaacggacagtttgagaccgtaccggagcttgtgtctttaaaacggagccaggcagatgcggggcttgatgcgaaacggttttctcaagaaattcctcatgacctgtacggccggattcaatcattctgcggggagcataaggtcagcgttctttctctgttccagtcagctctgatcgcttatctctacaaagtaacaggccgggatgacgtcgtcacgggtacgtttatgggaaaccggacgaatgcgaaggaaaagcagatgctcgggatgttcgtatctacggtgcctgtgcggacaagcgttgatggaggacagtcgttcttggaattcgtgaaaggccggatgaaggatctgatgaaaattctccgccaccaaaagtatccgtataacctgcttgtcaatgatttgcgcgcttcgaaaagttcgctgagcagattgtttacagtatctctggagtatcaggtgatgcagtggcagaaaaaagagaatctgtccttcctgacagacccgatcttcagcggaagcggaacaaatgatatttcgattcatgtgaaggaacgatgggacaccgggaaattgacgattgattttgactatcgcagtgacatattcaaagccgaggaaattaaatctgtttctgaacgtctgatcacgctgattgaagatgcgatttcatctcctgatcgcgtaattgatgagctcgctcttctttcggattctgagaaagaaatgcttctgaaacgggcctctggcaatcaggtggcttatcgcaaggagatgacgattccggcgctgtttgaagagaaagcgaagtcactgcctgacaaacccgcggttgtatatgaaggccgaacattgtcctacagcacattacatgatcagtcaaaccgtatcgctggacgccttcttaaagccgggatatcagcggactctcctgtcgcggtgctgctcggccgttctgaacgtgtcattgcggcaatattgggaattttgaaagcgggcagcgcatatgtgccgatcgatcctgactttccggcggatcggattcagtacatattggaggacagcggagcgaaggccgttctgacagaggccgggatacaggcgcgtgaaactgatgctgaatggattgattttgacgaggccgttcagtatgaggcggctgctgaaggtgtcggcactcaatcagaccggctggcttacattatctatacgtccggcacaacggggcggccgaaaggcgtgatgattgaacaccggcaagttcatcatctggttcaatcactccagcaggagatatatcaatgcggtgaacagacattaagaatggcgcttttggctccgtttcattttgatgcgtccgtcaaacagatttttgcctcacttcttctgggtcagacgctttatatcgtgccgaaaacaactgtaacgaacggctcggcactgctggactattatcgccaaaaccggattgaagccaccgacggaacgcctgcgcatctgcagatgatggttgcggcgggagatgtcagcggaattgaactgcgccacatgctcatcggcggagaaggcctgtctgcagctgttgctgaacagctgctgcaactctttcatcaaacgggcagagcgccgcggctgacaaatgtctacgggccaacggagacgtgcgtagatgcgtccgtgcacccggtgtcagcagataacggaatgatgcagcaggcggcgtacgttccgatcggaaaaccgctcggaaatgcccggctgtatatattggataaacacaaacggcttcagcccgacggtacggccggtgagctgtatatcgctggagacggtgtaggccgcggctatttaaatcttccggatttgaccgcagagaagtttttgcaagacccgttcagtgagagcggccgcatgtaccgtacgggtgatatggcacgctggctgccggacggcacaatcgaatatatcggccgtgaagatgatcaggtgaaagtccgcggctaccgcattgagctgggagaaattgaaacggtgctcagaaaagctccgggcgcggcggaggccgtcgtgctggcacggccggatcagcagggcagcttggatgtttgcgcctatatcgttcaggagaaaggaaccgagtttcatcctgccgagtacagggagtatgtgtccaaacaccttcctgattacatggtgcctgcttactttacaaaaacggataaaattccgctcacgccgagcgggaaggcggaccgcaaaaagctgttcgcgcttgatgtgcaggctgtcagttcgtccgagtatgcctcaccgagaaatgaaacggaggaaacgctcgccgtcatctggcaggaagtactcggcatggacaaggcgggtatttatgatcatttcttcgagtcaggcggtcattcattaaaggcaatgacgcttctgacgaaaattcataagcaaatgggcgttgaaattccgctgcagtacttgtttgagcatccgacaatcgcggcgcttgccgattatgcggcaagccgaaacgaaggaccggctttcagtacgattgagccggctgagaagcaagcgagctatccgctttctctcgctcagcagcgggtttatatcgcgagccaatttgaagatgcgggagtcgggtataacatgccggcggcagccatgatcgaaggcgctttagatcgtgaaaaacttgagcgtgcattttctgccttaatcagcagacatgaagcgctcagaacatcgtttcaatcagaagacggcacgccgagacaggtgattcatgagcaagttccatttcatattgaagtgattgaagcgggcggaagaacgaatgagcaggtcatgaaggactttgtgcgccgttttgagctggaagaggcgccgctgttcagaatcggtctgcaaacgctcggtcacaatcgccatatgatgctgtttgatatgcaccaccttatttcagacggggtgtctatttccatcatgctgaaggaacttgcagacatctatggcggaaaacagctgcctgaattgagcattcaatataaagattacgccgtctggcaggcggaacgggcggaagaaggctacaagaaggagcgggcatactggaaggaagtcttcagcggcgaactgccggtgcttcagctgctccctgattatccgcggccgcaggtgcaaagctttgaaggtgaccgcgtgtcagtcaagctgccgaaaacgctgcgggaacggctgcaaaagcttgccgagaaaaacggagccaccctttacatggtgctgttatcggcatattatacgctgctttctaaatattcaggacaggaagacatcatcgtagggacaccgtcagcgggaagacaccattctgatactgaggggttgatcgggatgtttgtcaacacccttgcgctgcggagcaccgtgaagcaggatcagacatttacaggcttgttaggccatgtgcgcaagcaggtgctggacgcgttttctcatcaggactatccgtttgagtggctgaccgaggaactgaatgtgccccgggatatgagcaggcacccgatatttgatacgatgttcagcctgcaaaatatttcggacggaattccggagatcggtaatctgacactgtctcttcatgaaacaaacttcaatatcgccaagttcgatctgacaatgcaggccagggagacggcagaaggcgttgcgcttgatctggactattgcacgaagctgtttaagcggtcgactgctgaccgtatgcttacgcattatgtccgcctgctggagagcgcggcagctcagccggaagcgaaaatcagcgaatatgatctgctttctgaacgggaggctttgaaccaattacagcggttcaacccggaacgcacggcatacccgaaagatcaaacgatcgtgcagatctttgaagaacaggctcaaaagaacccggaccggacggctcttcagttcgaaggggaaaccctgtcgtatcaacagctgaatgaacgggccaacaggcttgcgcggcatattctttcggccgggggcagcggaaaaaccgcggctgttttgtgtgaacggtcattggatatgattgtttccattatggctgtgttaaaagcggggtccgcctatgtgccgattgatcctgagcatccggttcagcggattcagcatttcttccgtgacagcggggcgagtgtgctcctgactcagcgaagcctcaagccgattgcggaaaaagccggttttcaaggcgtcatcgtgcttgctgatgatgaggagagctatgaaaaggactctcacaatctcgcgttgccgtttgattcaaaaaccattgcgaatctcacttatacatcaggcacgacgggaacgccgaaaggaaacatcgtcacacatgccaacatattacggacggtaaaaaacacgaactatttgaccgtttctgaagaagacacggtgctcggactgtcaaactacgtctttgacgcctttatgtttgatatgttcggttcgctgttaaacggtgcaaagcttgtgatcgttccgaaagatacggtgctggacatgtcccgcttgtcccgtgtgatcaaacgggagaatgtaagcattctgatgattacgacggccctgttccacctgcttgttgatatggagccgtcctgtctgacgacgcttcggaaaatcatgttcgggggcgaaagagcgtctgttgagcatgtcaagaaggcgcttgcggcagtcggaaaaggaagactgctccatatgtacggcccgtcggaaagcactgtatttgcgacataccatccagtggatgtcattgaagaggatgcgatctccgttccgatcggaaaaccggtcagcaatacggaaatcttcatcatgaacaaggccgggcgaatacagccggcaggcatcccgggagaactgtgcgtcagcggggaaggcctcgtagaaggctactacaaccgtcctgaactgacggaagaaaaatttgtaaaacatccgtttaaggaaggtgaacggatgtataaaacgggcgacttggccagatggctgccgaatggcgatatcgagtttatcggacgtatcgaccatcaggtgaaaatccggggacagcggattgagcttggcgaaattgagcatcagctccaaagtcatgaccaggttcaggaatgcatcgtgctcgctgtagaccagggcgcgggtgacaaacttctttgcgcgtactttgtcggccttagagaaatatcttcccgggaactgagggagcatacggcgaaggatctcccggcttatatgattccggccgtctttattcaaatggatgaattgcctcttacaggaaacggaaaaattgacaggcgggcgctgccgatgcctgatgtgactgcagcgaacgccgtgtcatatacggcgccgcgcaatgaaacagaacaaaaactaacggatatttgggctgaggtgctgcaaatggagcgggttggcatccatgatcagttctttgagatcggaggccattcgttagcggggatgaaactgcttgctctcattcagcagacattcggcgtccggcttacattaaaggatctgttcacttctccgacggctgcgggcctggcgaagctgattgccggatctgaacggaaggcggctgagagtatcatgcctgctgccgtgcgggaaacgtatccggtttcttcaccgcagaagcggatgttcgtgcttcagcagctggaaggcgctgaaacaagctataacatgccgtctgtgctgcgtttaaaaggaaagcttgatgcagaaaagctgaaatccgtcatgaaacagctgacagagcgccatgaagccttcagaacgacgtttgacataaaggatggagaaacggttcagcgtatatgggccgaagctgatattgacatggaatattacgaagcctctgaggaagacgctgaacaaattattcagagctttatccggccgttccgcctggatcagcttcctctcgtcagaacgggcctggtcaagctggctgaacatgatcacctgctgttgtttgacatgcaccatatcatttcggacggcgcttccgtaggcgtgctgatagatgaactgtcccgcttatatggcggcgaaacgcttgagccactgcggattcattataaagactatgcggtatggcagcagacatttattgaatcagagcagtatcgcaagcaggaggagcattggcttcgggagcttgacggcgagcttccggtattgacgcttccggctgattacagccgtcctgccgtgcaaacctttgaaggagacaagctggtcttttctctgacggagaagcagacgtcggctcttcgcagtcttgcgaaacaaacgggttctaccatgtacatggtgctgctggcgtcatacagcgcttttctctcaaaactgagcggacagcatgacatcattgtcggctcaccggtcgcgggacggtcacatgcggatctcgcaaacgtcatcggcgtatttgtgaatacactcgcgcttcggacgtatccggaggcggacaaaactttcgcggattatcttgaagaagtgaaacaaaccgcattacgtgcatttgatgcacaggattatccgcttgaagacctgctgcaaaaggttgaggtgcagcgtgatacgagcagaaatccgctgtttgatgcggtattctccatgcaaaacgcaaatgcggaagatctggtcatggaaggaattgagctgaagcatcatccgtttgacagaaaaacagccaagtttgatctgacaatgacggccgatgacacagacggaggcctgacgtttgtgcttgaatataacaccgcgctgtttaaaccggaaacggcagagacatggaagcattattggctccatctgttagaagccgcagcggaaaatccggctgcgaagctttccgagctttcattggtgaatgaaacagaaaaacaagccctccttaacgcatggaaaggaaaaacgctttccgtgccgcgggacaaaacggttcaccgtctctttgaagaaacggctgcccgccacacagaccgcccggccgtggcatacaacggcgtgaaatggacgtacggcgagctgaacgcaagggcgaaccgcatcgcccgcatcctcatggattgcggtgtcacggctgacgaacggatcggcattttgacgaaaccgtccttggaaatggccgcgggcgtactcggcgtcctgaaagcgggcgcggcatttgtgccgattgacccggactatccggaagaacgtatcagctacattctgcaggacagcggcgccaagcttcttctcacgcaggaagcgctcgatgtgccggacggctacaccggagaaacgattctgcttgacggcagccgctcgattctgagcctgccgcttgatgaaaatgatgaagcgaacccgcagacagaaacaacggcggatcacctcgcttatatgatttacacgtcgggaacgaccggacagccgaagggtgtcatggtcgaacaccatgcgctcgtgaatctgtgcttctggcaccacgacgcattcgccatgacggcggacgataagagcgccaaatacgcgggcttcggttttgacgcctccatctgggagatgttcccgacatggaccatcggcgcggagcttcacgtcattgacgaagcgatccggctggatatcacccgcttaaatcactatttccaagagcacggcgtgacgatcaccttcctgccgacgcagctggccgaacagtttatggagctggaaaatagctctctccgcatgcttctcgtcggaggcgacaagctgaagcgggcggtgaaacagccgtacacgatcgtcaacaactacggcccgacggaaaacaccgtcgtcgcaacaagcggcgtgatcaatccggaggaagattcgctttcaatcggacgggcgattgccaatacgagagcttatattctcggcgacggcgatcaggtgcagccggaaggcattgccggtgaattgtgcgtggcaggccgcgggcttgcgcgcggatacctgaaccgtgaagaagaaacggcgaagcggtttaccgccgatccgtttgtgcccggcgagcgcatgtaccggaccggcgacctcgtcaaatggaacacgcagtgcggcatcgaatacatcggccgcatcgaccagcaggtcaaagtgcgcggctaccggatcgagctttcagaaattgaagtccgcctcgcccagcttgcgggagttcatgacgcagccgtgacagcggtggaagacaaagcgggcaataccgcgctttgcgcctatgtcgcgcctcagcagacggacatcgaagcgctcaaagcggcgttgaaagatacccttcctgactacatggtgccggcgttctgggtggagatggacgagcttccggtcaccgcaaacggaaagattgacaaaaaagccctgccgtcgccggacattgaagcgggaagcgccgcgtacaaagcgccggaaacggaaatggagacgctgctttctgacatttggcaggaagtgctcggccttgaacagatcggcgtaagcgataatttcttcacgctcggcggcgactcgatcaaaggcatccaaatggcgagccgcctgaaccagcacggctacaagctggagatgaaggatctcttccagcacccgaccatcgaagagctcgtctcctatgtggagcggacggaaggcaagcaggccgatcagggccctgtcgaaggcgaagcggacttaacgccgatccagcgctggttctttgagaagaactttacggacaaacaccactggaaccaatccgtcatgcttcatgcgaaagacggctttgatccggctgtaacagaaaaaacattacatgtactgacggcgcatcatgatgcgctccggatgatttatcgcgagcaaaaaccgtattacagagggcttgaggatgcccctgttgaactgaacgtctttgagctgaacggacttgctgaagatcatgaagaccgtatcgaacgggaagcagatcgtcttcaaagcagtatttcactggaaacaggacctctgctgaaggccgggctcttccgggcggaagacggagatcaccttctccttgcgattcatcacttagtcgtagacggtgtatcttggcggattttactggaggacttcacttccgtttatacacagctgaagcaaggcaatgaaccggcgctgccgccgaaaacacattcatttgcggaatttgctgagagaatcaaagaatacgcaaatacgaaggcgtttctgaaagaagcggattactggaaagagcttgaggaaaaagaggtatgcactcagctcccgaaagacaggcagtcttctgatcagcgcatgaaatatacaagaacggtcagcttctctctgacagctgaacaaactgaacagctgacgacaaatgtacatgaagcctaccatacggaaatgaacgacatcctgctcacggcgctcggactggcgctgaaagagtggacgggtgaagacacgatcggcgttcacttggaaggccacgggcgcgaggacattcttgacggcctgaatatcacccggacggtcgggtggtttacgagcatgtatccgatgatccttgagatgaaacacgccgacgatctttcatatcagctgaaacaaatgaaagaagacatcaggcatatcccgaacaagggagtcggttacggtattctgcgttatgtaacggcgcctgagcataaagagaatctgtcgtttgagattgatccggatatcagctttaactacttaggacagtttaatgagatgtcggattccggcttatttacaaggtccgatatgccgtcaggacaatcgctgagccctgacacggagaagccgaatgcgcttgatattgtcggatttatagaaaatgggcagatgacgatgacgtttgcctatcattctctcgaatttcatgaaaaaaccattcaatcgttcagtgacagctttaaagggcaccttctggaaatcatagatcattgcctgtctcaagacggccctgaacttacgcctagtgatcttggtgatgatgatctgacgcttgatgaacttgataaattaatggaaattctttaacagaaaaggcagaggtgacttatgagcaaaaaatcgattcaaaaggtgtatgcactcacaccgatgcaggagggaatgctgtatcatgcgctgcttgatccgcattcttcctcctacttcacacaattagagcttaggattcatggatgctttcagcttgagctttttgaaaaaagcgtcaatgagctgatccggacatatgacatcctgcgtacggtattcgtgcaccagcagcttcaaaaaccgcgccaagtcgtattggcggagcggaagacaaaggtgcactatgaagatatcagtcaattagatgaagaacggcaaaccgaatatatagagcgctataaacgcgatgtgcagcagcagggttttcatctggcgaaggatattctctttaaagcggcggtattcagactcagtgagaaggagctgtatctcgtctggagcaatcatcatatcgtcatggacggctggagtatgggcgttttgatgaaaagcctgtttcaaaactatgaagcgcttcgtgccggccggcccgccgggggaagccagggcaagccttactctgactatatcaaatggctcggaggacgggattatgatgaggcggaacaatattggagcagccgcttggcggatttcgaacagccgagtctgctcccgggccgtctggcatcagaaaagaaaggctaccaaaatgaagaatattcttttgtctgggatgaagagctggtcgcgcaaattcagcagaccgccaaccggcatcaagtcacggggcctaacttgtttcaggccgtttggggcgcggtgctcagcaaatacaactatacagacgatgtagtgttcggaactgtcgtatcaggccgtccttcagaaatcaacggcattgaaacaatggccgggctgttcatcaatacgattcccgtcagaatcaagattgacaaagaagcatccttttctgacgtgatgacggcagttcagaaaaacgcagtggaagctgagcgctatgattatgtgccgctctatgacattcaaaagcgctccgctctggacggcagcctcttgaatcatttggtcgcgtttgaaaattatccgctggacaaagagctcgaaaacgggggcatggaggaaagactcggattttccataaaagtggaacatgcttttgagcagacgagctttgatttcaatctcatcgtttatccgggaaaaacgtggactgtcaaaatcaaatacaacggggcggctttcgctcatgatgccatcgaacgaacggcgcatcatctgacgcgcatgatgaaagcggcggtcggaacgcctgatgcccccgtgcgggatctcggccttgtttcaggcgaggaagaacggcagattgttgaaatattcaatgatacgaaaacggagcttccaaaagaggaggccgttcaccgtttgtttgaagcacaagcaaaccggacgcctgcaagcatcgcgataaaagaagatggacacgagtggacttaccgcgaagtaaacgaagcggccaaccgtctggcgagacatcttgtcgggaacggactggaaaaaggccggaccgcagctattatgaatgaccggtctgcggaaaccgttatcggaatgcttgccgtcttaaaagcagggggcgcatatgtgccgattgatccggcatttccggaggaccgtctccgcttcatggcggaagacagctcgattcagctcgtgctgacggttcaggcttatcaagaacaagcgggcacattgcaagttccggtcatcatgctggacgaaagcacggatgaaaaggtaagcggaacagacctgaatctcccttcaggcggaaacgatctggcgtatatcatgtatacatccggatcgaccggcaaaccgaaaggcgtcatgattgaacacagaaatatcatcaggctcgtcaaacattcgaattacgtgccggttcatgaagaagaccggatggcgcaaacgggagccgtcagctttgatgccggaacctttgaagttttcggtgcattgctgaacggagcttcgctgcacccggttaaaaaagagacgctgcttgacgccggacaattcgctcaatttcttaaagagcagcggatcacgacaatgtggctgacatctccgctgtttaaccagcttgcccaaaaggatgccggtatgtttaacacgctccggcacctcatcatcggcggggacgcgcttgtaccgcatatcgtcagcaaagtaagaaaggcgtcaccggagctctcgctttggaacggctacggcccgacggaaaatacgacgttttcgaccagttttctcattgatcaggactatgaaggttctgtcccgatcggtaagccgatcggaaattccactgcatacattatggacgaaaaccgcaatcttcagccgatcggcgcacccggtgagctgtgcgtcggcggaagcggagtggcaagaggctatgtgaatctgcctgaattaacggagaaacaatttgtctgtgatccattcagaccggatgaaatgatataccggacgggcgacttggcgaagtggcttccggacggcacgatcgagtttctcggcagaattgacaatcaagtaaaagtccgcggtttcagaatcgagctcggcgaaatcgaggcgaaaatcagccaggcggagaatgtgacggaatctgccgctgtgattcggaaaaacaaagcggacgaaaatgaaatctgcgcttactttacagcagaccaagccctttcgccggaagacttgcgcaaagcgctttcggaatcacttcctgaatacatgattcccgcgcacttcatccagatgaatcagtttccgctgacggcgaacggaaaaattgataaaaaggcgctgcctgagccgcagactgaagccgttcaaaaagaatacgaagcgccgaaaacggaagcggagcagaaactcgcggacatttgggaaggcattcttggggtaaaagcgggtgtgactgacaatttcttcacgattggcggacattctttaaaagccatgatgatgaccgctaaaatccaggagcattttcaaaaagaagtgccaatcaaagtgttatttgaaaagccgacaatccaggagcttgcgcattatttgcagcatgagagcgaggaggagcagcagtttgaaccgatccgacaagcgccttatcagaagcattatcctgtttcctcagcacaacgcaggatgtatatcctcaatcagcttgggcaggccagcacgagctacaacgtccctgctgtacttttgctggagggatcggtagacaaaaaccgtcttgagggggccatgcaggcattaatcaatcggcatgagacactgcgtacatcgtttgacatggcggatggagaagtcgtgcagaccattcataaaaatgtatcatttgagctggaaaccgcagaggtacgggaagaagatgcggaagagctgacaaaagcctttatcagaccgtttgcgctcaatcgtgcgccgctcgtccgttcgaagctgatccggattgaagaagatcgctatcttctgctgattgacatgcaccacattattacggacggcagctcaatgggcattttcatcggtgatctggcgaagctttatcaaggcacggagcttgcgccgccaaagatccattataaagatttttcagtctggcagcgtgaaaaagcaaatctcgatcagcacgaagcttactggctcgataggttcaaaggcgatctgccggtgctggacctgccgcttgatttcccgcgtcctgccgagcgcagttttgaaggggaacgcgtcattttcggacttgataagcaggtgacggcgcagattaagacgttgctggctgatacggatacgacgatgtatatgttcttgttagccgcttttcaagtgctgctctccaaatattcaggacaggaagatattatagtcggatctccggcagccggaagacagcatcctgatctccaagaggtgccgggcatgtttgtcaacacagttgcgcttcggtcgcatccttccggcaaaaaaacgttcaagcaattcctggacgaggtgaaaacggcgagtctgcaagcttttgagcatcaaagctatccgcttgaagaattaattgaaaaactgccgttaacgagggatacaagccggagtcctctgttcagcgtgttatttaatatgcagaacatggagatcccgtctctgcggctcggtgatttgcagatttcttcatattccatgcatcatcatgtcgctaaatttgatctttctttagaagcggctgaacgcggagaagaggtcggattgagctttgattatgcgaaagccttatttgcggatgaaacaatccgccgctggagcactcattttgtcaatctgattaaagcctgtgccgaaaatccggatattcagctggctgatgcaagtctgctgtctgcttctgagcgggaagcgctcctttctgatgaaaaacgtacggaagcggacctgcctgaaggcacttttgtttcgctgtttgaacggcaagcgcaaaaaacgcctgatctcacggcggttgcaggcggaacaagtctgacatatcgcgagctcgatgaacagtcgaaccggtttgcgcgccacctacagtcctgcggagcgggcagtgaggacatcgttgccattatgatggatcgttcggctgacttaattaccgcgattctcggcgtcatgaaagccggggctgcgtttctcccgattgatccggaaacgcctgaagagagaatccgctactctctggaagacagcgggacgaagcttctcgttgtcaatgagagaaatatgaccgcggctgccgtttataacggaaaaacggtcgtaatggaagacggagaatggcggaatgaaagcgccgatcggctcgaaacggagcccggcgccggtcagcttgcttatatcatttatacctcgggaacaacgggcaaaccgaaaggcgtccagctggagcatcgcaatctggtcaattatgtcacatggttcagccgtgaagccggtctgaccgaagctgacaaatccgtgctgctgtcttcctacgcatttgatctcggatacacggccctgttcccgatccttcaggcgggaggcgagctgcacattgtgccgaaagagacgtacaccgcgcctgatcagcttggtgagtatatagagaaaaacggcattacgtatatgaagctgacgccgtcattgttccatatgatcgtcaatacagcccgttttgcggaagaacgccgtttcagcccgcttcgtttagtggtgctcggcggtgaaaaaatcattacgtccgatgtccgcaagtttcatgacgtatacgcccatacggatttcatcaatcactacgggccgacggaaacgacgatcggcgccattgccgggcggatcaatatggagcggcttgatcaatatgagcagcgccccgtcatcggccgcccgatcgcaaataccggtgcgcttgtgctggacggatcaatgcagcttgttccttcgggcgcaagcggtgagctttatatcaccggaaaggggcttgccagaggatatctccaccgtccgcaactgacggctgagaagtttctccccaatcctttttcaccgggcagcctgatgtacaaaacgggagatgtcgtccgcaggctttctgacgggacgattgaatttatcggccgtgcggatgaccaggtgaaaatccggggctaccgcattgaattaaaagaggttgaaaccgtactgttaagcataaacggcattcaggaggcggtcgttctcgcggtcagcgaaggcgggctgccggaactgtgcgcgtactataagtccgacagcgacctgaaaggctccgagcttcgcaaacggctttccgaaacactcccgtctcatatgcttccggcctatttcgtgcaggttgaccatattccgctcacagccaacggaaaaacggataaaaacgctcttccgaaaccgggcgcaagccaaacggcgcaagcggcttcagccttgccggaaacggagctggaagagaagctgtgccgcatttggcaaaagacactcggtgcggattctctcggcatcgacgataatttcttcgattacggcgggcactctttaaaaggcatgatgcttctcgccaatattcaggctgaactggacaaaacggttccgttaaaagcgctgttcgaacagccgactgtccgccagcttgccgtatatatcgaaaaatcggcggtatctgagggatatcggatgatccggccagccggagcggctgacgtgtacccgttatcatccgcccaaaaacgaatgtacgtcctgaaccagcttgaccgggacacaatcagctacaacatgccgtccgttcttttgatggaaggagaagtcaatatttcaaggcttcaggaagcgctcaatcagatgatcaatcgccacgaatctttgcggacgtcttttatcgatcaaaaaggccggccgatgcagcggatcgcagaacaggcagacatcgagctgcacgtccttgaagcagctgatgaagagaaagccgatcttatcattcgggcattcattaagccgtttgatctgagtgcggctccgctcattcgggccgctcttgtcagattgaatgaaaagaaacacctgctgctcttggatatgcatcatattattgccgacggcgtgtccagaagcatgctggtcaaagagcttgcccatctttacaaaggcggaagtctgccggcgccgaacctgcattataaagatttcgccgtctggcagaatgaacctgagcaggccgaacggatgaaagagcatgagcgttattggctctctgcgttttccggcgagcttcctgaactgaatctgccgaccgattttcctcgtcctgcggttcaaagctttaaaggacaatccgtccgcttcagagcgggggttgaaacagaaaaagcggtgcgtgaattaatggatgcatcgggagcgactcttcacatggtgcttcacgccgcgttccatgtctttttgagcaaaatcacggggcagcgcgatattattatcggctcggtgaccgccggaagaacgagcgccgaagttcagcaaatgccgggcatgtttgtcaatacgcttgcgcttcgcaatgaaacgcgcaaagagcagaccttcgccgaactgctcgaacgggtgaaacaaaccaatctcgatgcgctggcgcatcaggaatatccgtttgaggatctgatcggaaagcttgacctgccgagagatatgagccgaaacccgttgttccaggttatggtgacgacagaagatccggataaagaaacgctggaactggagaacctgcgcattaccccgtatgagtcgaaccaaggcacggcgaaattcgatctgacgcttggcggctttacggatcaagaaggcctcggtcttcagtttgaatatgcgactgatctgtttaagaaagaaacaattgaaaagtggagcgccggcttcctgcgaattctgaaggaagcggcagaaagccctgacagaaagctgcctgagctttcactgatcagcgatgctgaacaacaagcccttcttaacgcatggaaaggaaaaacgctttccgtgccgcgggacaaaacggtttaccgtctctttgaagaaacggctgcccgccacacagaccgtccggccgtggcgtacaacggcgtgaaatggatgtacggcgagctgaacgcaagggcgaaccgcattgcgcgcattctcatggattgcggtgccacggctgacgaacggatcggcattttgacgaaaccgtccttggaaatggccgcgggcgtactcggcgtcctgaaagcgggagcggcatttgtgccgattgatccggactatccggaagaacgtatcagctacattctgcaggacagcggcgccaagctgcttctcacgcaggaagcgctcgatgtgccggatggctacaccggagaaacgattctgcttgacggcagccgctcgattctgagcctgccgcttgatgaaaatgatgaagcgaacccgcagacggaaacaacggcggatcacctcgcgtatatgatttacacgtcgggaacgaccggacagccgaagggtgtcatggtcgaacaccatgcgctcgtgaatctgtgcttctggcaccacgacgcattcgccatgacggcggacgataagagcgccaaatatgcgggcttcggttttgacgcctccatctgggagatgttcccgacatggaccatcggcgcggagcttcacgtcattgacgaagcgatccggctggatatcacccgcttaaatcactatttccaagagcacggcgtgacgatcaccttcctgccgacgcagctggccgaacagtttatggagctggaaaatagctctctccgcatgcttctcgtcggaggcgacaagctgaagcgggcggtgaaacagccgtacacgatcgtcaacaactacggcccgacggaaaacaccgtcgtcgcaacaagcggcgtgatcaatccggaggaagattcgctttcaatcggacgggcgattgccaatacgagagcttatattctcggcgacggcgatcaggtgcagccggaaggcattgccggtgaattgtgcgtggcaggccgcgggcttgcgcgcggatacctgaaccgtgaagaagaaacggcgaagcggtttaccgccgatccgtttgtgcccggcgagcgcatgtaccggaccggcgacctcgtcaaatggaacacgcagtgcggcatcgaatacatcggccgcatcgaccagcaggtcaaagtgcgcggctaccggatcgagctttcagaaattgaagtccgcctcgcccagcttgcgggagttcatgacgcagccgtgacagcggtggaagacaaagcgggcaataccgcgctttgcgcctatgtcgcgcctcagcagacggacatcgaagcgctcaaagcggcgttgaaagatacccttcctgactacatggtgccggcgttctgggtggagatggacgagcttccggtcaccgcaaacggaaagattgacaaaaaagccctgccgtcgccggacattgaagcgggaagcgccgcgtacaaagcgccggaaacggaaatggagacgctgctttctgacatttggcaggaagtgctcggccttgaacagatcggcgtaagcgataatttcttcacgctcggcggcgactcgatcaaaggcattcaaatggcgagccgcctgaaccagcacggctacaagctggagatgaaggatctcttccagcacccgaccatcgaagaactcgtctcctatgtggagcggacggaaggcaagcaggccgaccagggccctgtcgaaggcgaagcggacttaacgccgatccagcgctggttctttgagaaaaactttacggacaaacaccactggaaccagtccgttatgcttcatgcgaaagacggctttgatccggtactggtggaaaaaacgctgcaagcattgatcgaacatcacgatgcacttcgcatggtctaccgtgaagaaagggaaggcgtcattcagacatacctgcctgtcagtgaatgcaagacaagctttgaaatcgttgacctgtttggaactgacgaggatatgctgaaaagccagatccagcggcttgccgatcatcttcagggcagtcttgatctgcggaacggtccgctgctaaaagcagagcaataccggacagaacaaggcgatcaccttttaatcgcgattcaccatctcgtcgtggacggggtgtcgtggagaattctgcttgaggattttgcttcaggctataaacaggcacagcagcaaaacagcatcgttttcccgcagaaaacccactccttcaaagattgggcggaggcgctgcacacgtttgcgcagtcagatgagctgaagaagcaggcggattattgggcgcgggcagatgcggaacagctgccgcggctgccgaaagaccgtgatacgaaaaaacggctcgtcaagcatacggcggccgtgaaatgtgaactgactgaggaagaaacggcacagctgctcacggatgttcaccatccgtacggaacggaaatcaacgacattctgctcagcgcgctcggcttaacgatcggtgaatggacggaaaacggtaaagtcggcatcaacttagaagggcacggccgggaagaaatcataccgaatgtcaatatttcacgtacggtcggctggtttacggcccaatatcctctgattctgcaggtcagcaaggaggacggcgtctcctctgtcattaaaacggtaaaagagacggtgaggcgcgttcctgataaaggcgtcggctacggaattcttcgatatctgtcaccagatgaaacagaaagaagtttcacgccagaaatcagttttaactacttagggcagtttgacaatgaggtgaaaaccgaatggtttgagccgtctccatatgatatgggacgtcaggtcagcgaagagtcagaagcgttatacgcattgagcttcagcggtatgatcaccggcggccgcttcgtcatttcctgctcatacaatcaggaggaatatgaaagaagcaccgttgaaacacagatagaacggtttaaagacaatctcttaatgatcatccgccattgcacggccaaagaggagaaagaatttacgccgagcgatttcagcgcgaaggatcttgagatggatgaaatgggagacatctttgacatgcttgaggagaatttaacgtgataaaaacagataacagaaggggggagcggagcagatgagccaattcagcaaggatcaagttcaggatatgtattatttgtcgccgatgcaggagggaatgctgtttcatactctcctgaatcccggccaaagcttttacatcgaacaaatgacaatgaaagtaaaaggtgatttttccgtcaggatgctggaagaaagcatgaacgtcattgtggaccggtacgatatatttcgtaccgtgttcatccatgaaaaagtcaaacgcccggtgcaggtcgtcctgaaaaaaagaacttttcacattgacgaaatcgatctgacacatctttctgaaagcgaacagatgaccgccatcaatgagtataaagagaaagataaggtgaaaggattccagctgacccgtgacattccgatgcgtgccgccgtcttcaaaaaagcggataagcgctatgaatgggtatggagctatcaccatattctgcttgacggctggtgcttcggcgtcgtcgttcaagacttatttcaagtttataatgctttaagagaaaacaagccttacagtttaaaaccggtcaagccttataaagagtatattaaatggctcgaaaaacaggacaagcaggcatcgctcagctactggggcggctatttggcggatttcgagggtcagacgacgttcgctgagcaaaggaacaaacagaaagccgcttatcagccgaaggaactgcttttctccctgcccgaagcggaaacaaaagcgttcacggagctcgccaaatcacagcatacgactctcagtacggcgcttcaagccgtctggagcctgatactgggccgctatcagcgctcggatgatgtcatgttcggtacagttgtgtccggacgtcccgcggatattaaaggcgttgagcatatggtcggactgtttatcaatgttgtgccgaagcgggtccgcctcactgacggcatgaatttcaaagatttgctcagacatcttcaggagcagtcgctggagtcagagccgcatcaatatgtcccgctttatgacatacaaagccaggcttcccagcagaaactgattgaccatatcatcgtctttgaaaactatccgcttcaagacgccgacagcaaagaagcacggcagaacgggtttgaaatggaagatgtccacgtctttgaaaaatcaaactacgatctgaatgtcatggcgtcgccgggtgaacaaatgctgatcaagctggcttacaacgaaagtgtttttgacgaagcgtttatcagcaggctgaaatcgcaattgctgacagccgtcagctatatcgtacagcatccggaagcgccccttcatacggtgaatatcatagatgaggccgaagagaaacgccttgtcacagaccttaatccatcccgtctgtctgccgaggcgaaaaaactgacggattggttccgtcaggcggctgaagcaaatcctgacgcgccggcagtaacagccggagaaacaacgctgacttaccgggaacttcatgaagaatcaaaccgtctcgcgcaccgtttacaaaaacaaggaatcggaaaaggatcagtagccgctttgtttgtaaagcgttcttgtgagatggccgcaggaattctcggcattttaaaagcgggcgcggcatacctgccgatcgatccggagtacccggaggaccggatcgcctacatgcttgaagacagcaaagccggttgcatcgtgacgcatcaagcgctgtatgcggaagctgagaagctgccgtatgcgggaagcctgatgtgcattgacggagaagacgggcttgatgccccttctgatgaaccggaagcatccggcggcgccgatatgccggcatatatcatgtacacgtcaggaacaacgggcaaaccgaagggcaatgtgaccacacatgccaatattcaaagaatcgccaaaaacacaaactatatcagcatatccgaaacggatacggtgctctctctttccaactatgcctttgacggtttcaccttcgatttttacggatcgcttttaaacggagcaaggctcgtcattgcggataaggagaccattttgaatactgaaaagctgactgagctgatcgtttcagaaggcatcaccgtcatgtttgtcacaaccgcgctgtttaatgtgctgacagacgcgggtggcgagtggatgaaagggcttcggcatatcctatttggcggagaacgcgcttccgcggcccatgtcagaaaagcgctccgcatcatggggccgggcagactcattcacgtgtacgggccgactgaagtgaccgtgttcgcaacggctcataccattcatgacattcctgaatccatgtctgctgtcccgatcggcaggccgctgaatgaaacgggcgcttacattctcacggaaacagggcggctgcagccattcggagcggtcggtgaattgacgctgaccggaatgggtgtgtcaaacggctatctcaaccgggaagatttgacgaagcaaaaattcatcccgaatccattcaagtccggtgagcgcctataccgcacgggcgatttggcgcgctggctcccggacggcacgattgaatttgccggccgtattgacgatcaagtcaaaatccgcggacaccgtattgaacttgaagaaattgaaaagcagatccaagcgtatcaaggtgttaaagaagctgttgcagccgtcagccgcaatgaatcgggagacgcttacattgatgcatacctcgtatgcagcgctgaaattgacacgaacgggcttgaagtctttttaagcagacagcttccggcatacatggtgccgcaatcgttcacgatccttgagaaactcccgctcacgccaaacggcaaggtgaacaaacgcctgctgccgaaagcagagccgaagcagcggacaggcaaagaccagacgccgccgcgcaacgaaacggaagaacgcatcgcccgcatttgggccgaggtgctcggaacagaatcaatcgggattcatgatgacttctttgcgctcggaggccattctttaaaagcgatgaccgcggcgtcacacattaaaaaagagctcggtacggacattccggtgaagctgttattcgaagcgccgacaattgcgggcattgccgattttctgcttcacggtgaagaaaaaggaatgaaagatctcacaatcatgaataaaaatcagtctgacacactgtttgcgttcccgccggttctcggttacgggctgatgtaccagccgctcgcaaaacagctgtccggctgcagaatctgtgccttcgattttatcgaggaagacaaccgtatcgaccgctacactgaactgatcaatcagcttcagccggaaggggccatcaagctgttcggatactcggcaggctgcacgctcgcctttgaaaccgccaaacggcttgaagccgaaggccgtgaagtggagcggctgatcatggtggactcctataaaaaacaaggcgtcagtgacttggatggccgcaccgtagaaagtgatgtccaggcgctgatgaaggtgaaccgggacaatgaagcgctgaataacgaagccgtcaaagaagggctcgccaaaaaaacaaacgcattttattcttatttcgtacacaccgtcagcaccggcacggtcaacgcggatatagatcttttaacatcagaaccggactttgcgatgccgccgtggctcgcttcgtgggaggaagccacgacaggtgaataccgtgtgaaaaaaggctgcggcactcacgcagaaatgcttcagggagaatgtctcgaaaggaatgcggcacatttgctcgaattcctaaggaatgaacatctgaagctgacaacttcacgatagaaaaggaggaagccgctaatggtccagctctttaaatcgttcgatacgacagaaaaaacgcagctcatctgttttccgttcgcaggaggctattccgcatcattccgcccgctccacacctatcttcagggtgagtgtgagatgctagccgcggaaccgccgggacacggcacaaatcaaatgtccgccgttgaagattttgagcagctcgtcagcttgtacaagcaggagttgaatctcagtcctgaccgcccgtttgtgctgttcggccacagtatgggaggcatggtcgctttcaggctggcgcaaaagctggagcgggaaggcatttacccgcaggccgtgatcatctcagccatccagccgccgcatgcggaaaggaaaaaagtttctcatcttgatgatgaaaaatttctcgcccatattatcgagcttggcggaatgccgcaggagttagtggaaaataaggaggtcatgtcatttttcctgccttctttcagatccgactaccgcgcgcttgaaagcttccgcccgtctgattctcacatcattcaatcacccgtccatatttttaatgggcggaaggatcataaatgtatcagagatgcggacggttggaaaaaatgggccgcaaatcccgtttttcatgagttttcggacggccacatgttcatattaagtgaaactgaacatgtggcggaacgaatttatgagattattaacaggagcactgcaggccaattgttataaaatatgacagacagcatccgctgtctgttttttgtaacaaaatcggccttggagttttctcatttatcaaaaattttatgttatgatttaatggaatatcactttgaagggattgtcgtacatgaatgatgcagctaaagagctgaacagaacattatctgaagaaaacccgcacgtgcttcatatgctttctgatttgggcaaagatttgttttatccgaaaggggtgctgacgcaatcggcggaagcgaaagccaaggccggaaagtataatgccacaatcggaatcgccacctcacaaggagagtccatgcacttttcccatatacaagagacattgtccgcctataaccccgatgatatctacgattatgctccgccgcagggaaaagagccgctcagacaggaatggctgaaaaaaatgcgtctcgaaaatccttcattagccggcaaagacatcagcacgccgatcgtgacaaacgctttgacacacgggctgagcattgccgccgacttgttcgtcaatgaaggggatacgctgcttctgcctgataaatattggggaaattacaacttcattttcggtgtccggcgcaaggcatctattgagacgtacccgctttttcagcaggatgggcgttttaatgcggctggtctgtccgagctgctgaaaaagcaggaagagaaggcgattgtcgtgctgaatttcccgaataatccgacaggctatacgccgggggaagaggaagcgttagaaatcgtcagcgtgattctggaggcagcggaggctggcaaagagattgtcgtactcgtagacgatgcgtattacaatttgttttacgatgaaacggccattcaggaatccatcttcagcaaactcgcccaagtgcatgacagggtgctttgcgtgaaaatagacggagccacaaaggaaaattacgcatgggggttccgcgtcggttttattacgtacagcgcaaaaagcgaaaaagcgctgcgcgtgcttgaggaaaaaacaaaagggattatcaggggaacgatttcaagcgccccgcatccgtcccaaacattcatgctgcgggcgatgcagtcaccggaatacgagaaagaaaaatcactgaaatacaacatcatgaaaaaacgggctgacaaagtgaaagccgttcttgcaaaaaacaagcactatgaagacgtatggacgccttatccgtttaactcaggctatttcatgtgtgtccggctgaaagatataaacgccggcgaattgagagtgtcattgcttgaaaagagagggatcggtacgatatccattaatgaaacggatttgcgaatcgcgttttcatgcgttgaagaagaacatatcgcggatttgtttgaagaaatttatcaagaagcaaagcagctgcagaaacaggcggaaatatcaggctgacaaaaaaggaggggggcacccctcctttttctatgcttacagcagttcttcatacgttttcatctcaatcccgtcacaaaaatcgggatgagccgcacaaaccgccagcttatattcttcgtccgcatcatatgtgcggatgaaacatggttcatgtccgtccgggagttcaatggacacacaaccgtcctcttcaaggcggacgctgaatgaatcaagcggcagggaaagcccttttccggcctgtttgataaagctttctttcattgaccacaggtgataaaaataatcggtctgccgatcgggatgtttcgcttgcagatcactgtattctgaaggcgagaaaaaacgtttcgctatatcaatcgtgccgggcttcattttttcaatatcgatgccgatcggttttgagtcaacggcacacacgatccagcgcccggagtgggaaatattaaagtgcaagtccggaagcgcggggatgtacggctttccgtactcctggacgctgaatacaatcgcagccggattaagtccgtaagccctccccgcaatggtgcggatgagcatgtcgcccagcaaggtgcggtgagcatcctctttatgataaaagcgccggcatttttcccgcttttcagcggacacagccgccatcatccgatcctcttcccttggagaaagcgggcggtccatatatactccgtaaatcttcatgtccagatcctccgtctgcaaatattgtcaaaaccatcctatcatatcagacgcaagctgtccggcaataaaaaaaacaaaaccgtgtcggctttgttcttaatgaacggacgctgcccgcccgtagatcgcatatgttaacagtttagaggactgaggcaaagaaaaacgcagaatcagcccggtcaaaacagccgtaataatggttccggctccgatcggtccgcccatcgtccaggctgcggcaagaatcgtcagttcaatgccgttccgcacccattgcacgttccagcccgttttttcagaaatcagcagcatcagagagtcccgggggcccgcgccgagcccggccgatacgtaaataccgacgccgcagccgatcagcagcaatccgaaagaaaaaaacacggccgctaaggaaaaagcgtgcgcttcaggaagcagaaatgaaaaaaaatcaataaacattcccatcatcagcatattcaagatggcgccgattttcgggagcgttctcgtgaacaggcaggttaaagcgacgatcaccgcgccgaccacgatggaccattgcccgacggaaagaccgaaatgctgaaaaagcccataatgaaaggcatcccaagggctgatgccgagagcttttcctttaatggttaaagataccccgaaagacaaaatcaacagaccggcaaaataaaacgtccagcgcatcacgaattcccgcttcaaagaggtcccttctttcataaaatctcattaattgtcattgtagcataactgccaaaaaaaagaagagcgaaatcagtgtttcgcttcttcttcggctcctacaaaggattcagtatacgattcaaaaaccgctgcgtgcgttcttctttcggcgcggaaaaaatttgggccggtggtccttgttccacaatgacgccgccgtcaatgaagatgacttcatcggccacttcctgcgcgaatttgatttcatgcgtgacgacaaccatcgtccagccttcattcgccaaatccttaataactttgagcacctcgccgaccagctccgggtcaagcgctgacgtcggttcgtcaaacagcatcagctcaggctgaatcgcaagcgcgcgggcgatgccgacacgctgctgctgaccgccggaaagctggaacggatataaattcattttgtctttcagtccgactttttcaagaagctcaatcgcttcttttctgacttgctctttgtcgcgcttttgcacttgaatgggtccttccataacgttctcaagcgccgtgcggtgaggaaacagatgatacgcctgaaagaccatgcctgatttgcggcggaggcgaaggatatcagcctgcttcacttttttggagaaatctattgaaaaatcggagaatgccagctcgccgtgattgggaatctcaagcgcgttcagacagcgcagtagcgtcgtttttcctgaaccggacggtcccagaacggcgatgactttccctttttctatctccatatctatcttttttaaaatttcattctggccgaatgatttatttaatcctttaacagaaagcatatcgaaacctccttatttggccacataacggtcgagacgccgttcgatcacaagctgtacgattgacagcaagaagcagatgatccaataaataaaggcggcttcaatatagatgaccaagatctgatcaaggttttgcgcgccgatttcctgcgctttcctgaacagctccgcgacgagaatttgtgacgcgagagatgtatccttgatcaggctgataaatgtatttgataatggcggaatggacacgcgaaacgcctgcggcaggatcacgcggaacaatgtcttgcgataggtcatgccgatcgtataaccggcttcccattgccctttcggcacggatgaaatagatgcccgaatgatttcagaagcataggcgcctacgtttagtgaaaatgcgatgacagcgcttgggaaagggtccagtgtaatattaaaggtcgggaacagataaaaaatgatgaacaattgaacgagaagaggagtgccgcgcaccgctgatacatatacgctgaacacccatctcaatggtttcatatttgacattctggcgagcgccgtaatcagcgcgatgatcattccgaaaataaaggaaagaatggtaaggggaatcgagtaatagattcccccggaaagaatcggccagaatgactgctgcaccagatcccatggaatggctgccgcaatcacgggctcaggcatgttacttagaaacatcttcgccgaaccattttttagctattttagaaagagtcccgtcctctttcatttcttttaacgctttgttgacgtgagtcacaagttcgccgcttccttttcggaatgcgaaataagtttgttgcggctgcccagcttcaaacgcgattttcacgtttttattgccggacgtttttaagtagttcagtacggcaagcttatcgttgtaagtcagatcagcgcggccctgctgaatgagctgaagggattgcgccatgccttcaacgccttcaattttcgcgccggcttctttcgctaatttattgtaattgcttgttaatgactgagccgcggtttttcctttgacatcagcttcttttgcaatcgtgctgtcttttttcgtcacgacgacggcatttgacgttgtgtatttatcagaaaaatcatattggttctcacggcctgttttgccgacttggttagcgacgacgtcaaaccgtttagcatttaatccggcaaacatgctgtcccattgcgtttctttgaagtcagctttcagaccgaggcgtttcgcgacttcttgaatgacctcaacatcatatccggtcagtttgtcagtctttttatcatggaaggtaaatggttcatacgttccttctgtaccgacggtcagtacgccttttttcttgacagaagcccaaagatcgccgtcttttgacttcgatccgctgtcctgtgagtttccgcaggctgcaagcaccgcgatgctgaccatcatgaataaagccaataatgcttttttcattttctttattccccacttttctgattagttttattgagaaaaaatagctcccaattgtaaaggataacttttttttagtatgagtcaagtaattggttttcatgagtgtgaaatctccgtgtttccgggggtcaaaataattgcaaaaactgtctgaccggcttcggcaggtagctgtcttttctccagatgacggccggtgtcatgacaaacgggttgtcctcgatggcgaccgttttgacatgcgatcgcatatggacgggaatcatcgtcaaaggcagaatcgtggctccgaacccagatgagacgaggctcaaaagtgtcgcggagtcatggcattcacagacaacctgaaggtcgagaccgtactgttcacaaacatggaggacttggtcatacacaccccttccattgacggtgcgcaaaaggatcagaggcaaagaagcgatgtccttcagcttaatcgtttttccgcacaggcgttttgtatgctcagacagcaccaatacacacggaatgtcttcaagctcctttgattcaatgccgtcgctcttaatcaaggtggtggtgacggcggcgtcaatctgtcgggattctaagagctccagcagtgagacgggttcgtcttcccaaatgttaaaggtgagatgaggataccgctctttcatctgcgacactttctcaagcatgagtgcggcgcagtaaatggttgaccccacggcaagggggccggctgcttcttccttcagctcttgtacctcgataatggcgtcctcaaacttatgaagaatctctttcgctcttttcaaaaatacgtttccttcatatgtaagggtcatttgtttctttttattgcggtcaaacagaatgacgcccaattcttcttcgagctgtttcagctgtctgcttaacggcggctgagccatatgaagctttttggcggccgtcgtaattttctgctcttgggcaatggtgacgaaataacgcaattgccggatatccatgagaatgcgctcctttcttttatacctttagggtatgatatatagatttaacgaatatttttcatatggatatatcaggagtatgatggttttgacaccatatttcaagcgtaaaggagggttcaatatgaaactcgtcatcggaatgaccggggctacgggagccatattcgggatcaggcttttagaatatttaaaggccgcggagatcgaaacccatcttgtcgtttctccttgggcaaatgtcaccatcacacatgaaaccgattatacgttaaaagatgtagagaaactggcgtcctatacgtattctcacaaagaccaggcagcggcgatttcaagcggctcgtttgaaacggatgggatgatcatcgctccgtgcagcatgaaatcacttgcaagcatccgcaccggaatggctgacaatctgctgacaagagcggctgacgtcatcctgaaagagcggaaaaaacttgtgcttctgaccagagaaacgccgctcagccaaatccatttagagaatatgctagcgcttacaaaaatgggttccgtcattcttccgccgatgccggctttttacaacaaaccggctgacatggacgaattgatcgaccacattgtgttccggacgctcgaccagttcggcatccgtctgccggaagcgaaacggtggtacggaattgaaaaacaaaaaggaggaatctgataatggcctatcaggattttagggaatttctcgccgctcttgaaaaagaagggcagctgttaacagtcaacgaagaggtaaaaccggagccggatctgggcgccgccgcgcgtgcagccagcaacctcggggataaaagccccgcacttttgtttaacaatatttacggacaacatcatgcgcaggtcgccttgaatgtcatcggctcctggccgaatcacgcgatgatgctgggcatgccgaaagatacgcctgtaaaagaacaattctttgagttcgccaaacggtacgattcatttccggtatcggtcaaacgggaagaaactgcgccgtttcatgaaaatgaaataacggaagacatcaatctttttgacatccttccgttattcagaatcaaccagggagacggcggctattatttggataaagcgtgcgtcatttcccgcgatcttgaagacccggacaatttcggcaagcagaatgtcggcatttacagaatgcaggtgaagggaaaagaccgcctcggcatccagcccgtgcctcagcatgatattgcgattcatcttcgccaggctgaagaacggggcgtgaatcttcccgttacgatcgcgctgggctgtgagccggtgattacgacggccgcgtcaactccgctgttatacgatcaatccgagtatgaaatggccggagcgattcaaggggagccttacagaatcgtcaaatccaagctgtccgacttagacatcccgtggggcgccgaagtcgttctggaaggagagattctcgcgggagaacgggaatacgaaggcccttttggtgagttcacgggtcattattcaggcggccgcagcatgccggtgatcaaaatcaaacgtgtatatcatagaaacaatccgatttttgaacatttgtacttaggcatgccgtggacggagtgcgactatatgatcggcattaatacatgtgtgcctctttaccagcagctgaaggaagcatatccgaacgaaatcgtcgccgtcaatgccatgtatacgcacggtctgatcgccatcatttcaacgaaaacacgatacggcggctttgctaaggcggtcggcatgcgcgccctgacaacaccgcacggactcggctactgcaaaatggtcattgtcgtggatgaggatgtcgatccgtttaatctgccgcaagtcatgtgggcgctttcaacgaaaatgcatccgaaacacgacgcagtcattattcctgacctgtccgttcttccgcttgacccggggtctgatccggcagggatgacacacaaaatgattcttgacgccacaacgcctgccgcgccggaaacaagaggccattattcgcagccgcttgattctccgctgacaacaaaagagtgggaacaaaaactgatggacttaatgaatcaataagaaaggatgagtttgcaatgaaaacatgcccgcgctgtgaatcgaaaaaaggagaaaccgtcagccaatcgccggtcaaaggcgcttgggaaatataccaatgccaaacctgcttttttacatggagatcctgtgaaccggaaagcatcacgaatccggaaacattcaacccggcatttaaaattgatccgaaagaaacggagacggccactcaagttcccgctgttccggaaagaaaagcgtaatgctgacggagcatttgccggaagccctttacacgcttttagacgggacggagcttgagaaaaagcagcacgatgcatttgtactgcaatccgtgacaaaacaaggccgtccgcacgcggccatgatcagcgccggtgagattctggccgtgagcagcacaaatctccggatcgccttatggaaaaacacgacgactgtaaaaagcctgctgcattcgggacaagctcttttcatcgcctggcacggaggagctgcctattacgtcacattggaatgtgaggcgcttccgccgctgaaagaggcgaaatacgagcgggaacggttcagctgccgcgtgatttccgtcaaggaagatcgggcgaaatacgctgatctgacgtccggcccggccattcagcttcacgagccggaaagtgtcctgaagagatggagcgaaacgcttgaggagttaaaacaataaacgcacaaaaaaagcctgcggacgcttccgcaggcttttctattattgtacgcctttcatcgcccgtttaataacgggagaaagaagaaccaaaataataccgagaatgatggaaataagcccgattgagccgaaataggccgcttcagaaatcttatcaaacaaaccgactacttttgcgttcagggcttggccgcaggcgtttgttaagaaccacatactcattgtctgcgctgagaaagcggcaggcgcaagcttcgttgtgacagataaaccgaccggtgaaaggcaaagctcaccaagcacaaccaaaaggaagctgagcacaagccaaagcgggctcacaagctcgccgcttccgcccataaccggaagcaccatgactaaaaatgacaatccggcaaggataatgccgatcgcgaatttaatcggtgttgaaggctggcgtttgccgagcttcatccagaaccaagcgaacaccggcgcgaaaataacgatgaataatgggttcagagactggaaccatgaagactcaagatgcattcccgcaaaagaaagcctcgtgcgctgatccgcatataaagcaagaatcgtcgcaccctgttcctgaatagcccagaacatggccgccgcaataaacagcggaatataagccgcaagccgtgatttttccgttcttgtcgcttttttgcttgtgaacatcacgataaagtagataaccggaatgacaatgccgaggacactgacgacgtcaattacacgctggattgtcagccagccggtttggatgagaacgaaaataacggcggctgcgatgaccactccgattcccgttccgatcactgatgatttagaaatcggattcggtacattggagcctgctttgccgaggtatttctttctcgtaagagcgaaaacaatcagtccgaggaacataccggccgcggcgcatccgaagcctaagtggtagttgtacttctgtccgagtgttccgacaattagcggcgcaactaatccgccgaggttgatccccatgtaaaagatactgaaaccagagtcgcggcgctcgtcttccttcgtatatagatctccgacaacgctggatacgttcggtttaagcaggccggttccgataatgatcagagccatgctgagaaaaaacgccgccgtgctgccagggaaggcaagagcgatgtggccgaacataattaaaattccgccgtagaatacggtgtttgccgtaccgaatacccggtcggccagccatccgccgatgacgctcgacatgtatacgagagatccgtatatggacatgatggcaactgcggtgcttttatcaaagccgagaccgccatgagcgacttccgtgtataaatagtaaagcaatatagctctcataccatagtaggagaaacgctcccaaaattcggtgaaaaacagtgtgaacaagccgcggggatgaccgaaaaagcctcgttgcggcacagtttctgttatagcttccttttcaatagatgccacctgagccaaccctttcttaaaaaagtgtattacaaaaatcatattcttatataatacttgtgtcaatataatttatactgaattcaaaaaattccagaatgaaaagatattataacgaagaatatagacgtattttcctaattccaatgacttatttttggtatattatctaactaaactatctttataaacttttttaataaaatttaaagtatgtacaggcggagcgggatatggcggaataagatggcaataagagagaaaggaggagatcatcacttgccgaatcgtatattggatataacggattgcggcgtggcggcagacgggaaaaccgacgtgacaagcgccatcaaccaatgtttggccaaagccgtcagcgagggctgtcatacggtgttttttccgtccggaacgtataaaatcaacggcacgcttggcggtgacagcggccagccgtttaggaacgccggaattaatgtgccgagccatctctccatcgtcatggatccggaatgcacgattaaagtaacgccgaacagctcctggggctactcggctttctatataggcaggcgggaaaatgtcaccatcaccgggggccgcatcatcggggatcgggatgaacacaagtatatcaatgttcctttgcggtcgacccatgaatggggattcggaatctgtattgaaggcagcagcaatgtactgatcgaagatgtggagatatcggattttacgggagacggcattattgtcagtccgctcgggttaaaaacaaacagtgattacgaaacatcagaacatataaccatccgccgctgcgatatcagacagtcaagacgcaacaacatttcaatcaccggctgcaacaccgtcacggtggaagactgcgtgattgaagacgccgggaaaggaaatggaacagccccgaaattcggaatcgatattgaatcgtacggagaaggcgatgttgattatgaagaggctcttcatattacgatccgcaacaacttcttttacggaaacaccgcaagctcagtcaccaactttaacggatataacgtgttaattgaaggaaatcattccgacaatacaatcagttacgggtacggcgcgcataccgtcatttcagggaacgtcctcttttggtcaaacggcggctcaagaaccggaatcgccggacaaggtgtgtcacaagggcaggacagcagcaatgccgtcatttccagcaatctgattaccggtttttccaccgggatagatgtaagggggaaaagcgtcctcgttacccacaacaaaatcaatcaatttgaaaatacgggcatttccgtctatcgggcggaagatgtgaccgttgacggcaatgtcattgaaaacgggcgttccgaaacgggacgaagcgcgggaatgcgggccacgctttctgaaaacgccgtctttatgaataacactttgaatcaggtaacagacggaatcagcatatcagccggcaatatcaccgtaaaacagaatgtgctgaaatcgttcagccggggcatatgggtcacaggcggaaatgccctcattgaaggaaatacgctcatccctaatgcgtttcagggcgccgcagagtcctatgccgtatctgtgacaaacgacgccaaggctgtcatcaaaggcaatctcttcaaaagctacaaaaactatcccattttcagttcgacatcctcaggaacctctgtcatcggcaaccgctttgaatcatcaccgcttatcgttaccgtgtatctgaactcaggaacgcatgaagtcatagacaataccatcacgatcaaccgaacggcgggcagcccgatcggcatctatctgaacggaacctccaattccctcgtttcggggaataccatcaacaacctttccgccgcttctgcttcggctatccaaaccagttcctccgcaagcacgaaaatcatcggcaaccgcattatcaaaggcatcattgtaaaacacactacagatacggaaatcggaaatatcgtcatctgatcatcattaccgtctgaacaataaaaagaacacatgaactccgaaaaaaggagcgatgtgttcttttttgacacaatacagctttcaacagcagtgacgaagtgccgggcgcttgtcaggcatctttttttcctgttttatataaagccaacatttctttgattaaaaagagggcgaagaaaaacagcatcagccattctgagaaggtcatcaatttaaaagcggacaggttgttttgaaccgctccatagagactgaaaccttgcagcatatccacccctacagaaatcatcagacaggaagtcagtaaaaaaatggaaatccccaatattttcatgcggtatcactctccctttttatccttttcaaatttgcaaaacttatacagactttccgccgtgcataatcttttgccgtacaggaagaatatgaaaaaaacgaggaaaggttttttgcgatatgccgccattttttaagcagaagaaacaaaaaaaagccgatcaaaacgaccgtggcaatgaagacagaaaagaaccggaaaacaaatcagacaaagagcgggaggagccgatctccctcagcttagagaaaaatatgaagaagctgtctgcgaggttcggcaacagtgctgatgtcgttatccgccggctgaaaatcggaaaggaagagcttccggccgcgattgtgtatatcgccggtttggtagacgaacagcttgtcagccaatctcttctggaagatttaatcgatattccgtccgttcagccggaacaagcggtctgcctgatatacgaaaaaacgcttgcgatcggcggagtaaaagaggaagagaaatggaaaagcctttttgccgggctggtggcgggcagcacgctcatttttgtcgacggggctgacaaggcgctgatcgccagtacggaaggaggggaacaccggtccattcaagagccgagcactcaggtgtccttccgcggcccgcggcagggattcacagaatctctgcaaaccaatatttccatgatccgcaggtatgtaaaaacgcctgatgtatgggttgaaaaaatggagatcggacacgagacgaatacggacgtcgcgctgatgtatatcaacggaatttgtgaaaaaaagctgattaaggaagtccgcaagcggctgaagcacattgatatcgacagcattctggaatccggctacattgagcagcttatagaagacgcgccgttttccgtgtttcccactgtgtatcatacggaacgtccggacgttgttgcgggaaatctgctggaaggaagatttgcgattatcgtggatggaacgccgtttgttctcctcgcaccggccttatttattcaattttttcaatcagttgaggattattattcacgatttgatatcgctacaagcatcaggctgcttcgggttttgatattcttcatttcactggtggcgccggggatttatgtggcggcggcgacctttcatcaggaaatgattccgacgcagctgctgattgtcatcgccgcccagcgggagacggtcccgtttccggccgtcattgaagcgctgacgatggaagtggccttcgagattctcagggaggcgggcgtccgtcttccgagagttgcgggttccgccgtttctatagttggagcgctcgtcatcggccaggccgccgtacaggccggcatcgtttccccggccatggttatcgtcgtcgcgctgacggcgattgccagctttgcgaccccggcttttgacatggcgatatctgcgcgcctgatccggtttgtctttattctgtcggcggcggtgatgggattttacgggctgattctgggcattatcatgatgtttgttcatctgtgcagcctgcgttcattcggttttccgtatatgtccccgctcgctcctttgtccccgggcgggctgaaggattcccttctccgcgctccgctgtgggcggatgaaaaaaggccgggactgctcgtgcagaaaaacaacaggcgccaaggagaacatcaaagaccgaaaccggagacatccagaggaatggttaataaagatatagaagagggcgacggtaatgaaaagacgtaaatggatactcctcctttgtacgatggtttccctcatgtttgtatccgggtgctgggataaaagagagctgaccgatttggcggtgatctccgccatcggtattgaccggaccgaatcgggaaaatacgtctttcactttcaaattatcaacccgggaaacgtggccggcggtctgcagggcggcggagcgggagaccggcctccggtttccgtctattccgtgtccggagacaatatgacggaagctttgagaaaaggctcgatgaaggtgtccagaaggctctattttgcgcatacgaatcttgtggtgttcagtgaaaagctggcgaaagaggaagggctcagttttattctggacaatcttgaccgcgacaccgaattcaggacgaccgcaaccgcggtcattgcgcataattgcaaggctgaagacattattaaagtgctgacgccgattgataaaatcccttccaataaagtgaacaagacgctcagctttacgcaggaacaatacggcagagtcattaaaacaagccttcaggacgttctgattgatctcgcctctccgaccgggtcgccgtttataccgggttatgaaatgcacggagacgataaagtcggtcctacgatggaaaatacgcagacgactgaaccgaaagcgctgctgtcagctgacggattggctgtgttcaaaaaggatgggagactcgattactggatcgaggatgacgacagtgtgggcgcggtatggctgctgaacaaaatcaagcatacgttcatcaatgcggattggaagaacgttaagcatgcaatcagtctgcaggtcacccgccagaatacgaaggtgacggccacttttccgggcgggaaaccgcatattcacgttcatgctgaggtcgaaggactggtggacgccgtcagataccctttccatctgtctgatccgaaagtgctgatgaccatgcaaaaggcgctcagcgcgcagcttgacaaagatatcaccaaatctattgaagatattaaggctcataagaatgatttcatcggcttcggagacctgatttatcggcagcatccgcataaatggaaaaagttaaaagggaagtgggatgaagaaatctttcctaatctccccgtggatgtaaaaacggaagtcatcatcagaagaacgggcttgcggaataatcctctttcagacgagctccagcatgattgatttgaggagaaaggagcaaagcacatggaaaatgccaaaatcggcacgcgtcagctgtttattatgatcattttgtttgaattgggcagttcgttattgatcccgccgggcacgatggccggacgggatgcatggctgtccgtgcttctcgggtgcgttgtcggtctcggacttttctacgtttatcaggcgctgtatcagtattttcctgagtcttctccgagagattacatgaacgaactgatcggcaggcatctgagctgggtggtctttcttctctatattctctattttgcttatatcgccgcccgtgtattgagggattttggcgaaatgcttgtcaccttcgcctatcaggacacaccgcttgtcattgtgaatgccatgctgatgattgctgcgatatttgcggtcagaaagggaattgaagtcatagcgagagccggcgagctgctgtttggcattatgtatttcctgacggccatcgggctgatcctccttatcagctccggcacgataaacctcagatttctccagcctgtcttagcggaaggcatggggacagtcatttattccgtgtttaaacagaccatgttcatcccgttcggtgaattaatcgtgtttgtcatgattttcccttacttaaaagatcggaaaaaagtgaagaaaacaggatttctggcgattatcatcagcggtctgtttttggcgatgtcggtggcgattaatatttgtgtgctggacgtcaacttaatgctccgctctcaattcccgctgctgagcaccatacagacgattaaagtggaagagtttttagaccggctggatgtcttttttatgctcgtgctcgtcatcggcggttttttcaaagtcagtctttttacatattcggttgtcgtgggggtctccacgctgtttaaagagaaaaatccgtcccagctggccttgccggtcggattgggagtactgattctctccatcagcatcgcaagcaatttttcggaacacatgaatgaaggcttaaaaattgtgccgatctatattcatcttccgtttcaagtgctgttccccgttttgctgcttatcattgccgtgatcaagaaaaaagtcaaagggagcgtctatacagtttcgaagaaataacccggccgatgcgccgggttatttttaaaatcatgatttttgtctgaatgcattgacaaacttgcctgacaattgtacattttgatttattcttataaatttactaggaaatataggtttagtagtgttaatattttccgaacggtatttcagaatagaaggagatacgtcatgacaaagaaaaaagaaatcaaactcggtgtgtttctcgcgggcaccggccatcatgtcgcctcttggagacatcctgaggctccggcggacgcgagcatgaatttagattatttcaaagaactggccaaaacagcggagcgggggaaattggacatgctgtttttagcggacagtttatcaatagacagcaaatcacatccgaatgtgttaacgcgttttgagccgtttacgctgctgtcggcgctcgctcaggtcacatcccgcatcggtctgacggcgaccgcttccactacatacagtgaaccgttccacatcgcgagacaaattgcatcgcttgatcatctttccaacggccgcgcgggctggaatgtcgtcacatcatcaattgaatcaaccgcgcttaatttcagcggcgaaaagcatcttgagcaccatctcagatatcagcgcgcggaagaattcgttgaagtcgtcaaaggattatgggattcgtgggaggaagacgcctttatccgcgacaaagaatcagggacgttttttgataaagacaaaatgcatgaattgaatcataaaggaacatatttttccgtaagagggccgttaaatgccgcccgcactccgcagggccgccccgtcatcattcaggcgggatcatcaggagacggaaaggcgctggccgccaaaacggcggaggtcatttttaccgcgcaaaaccatttggaatctgcgcaggaattctatcattctattaaagaacaagcggcttctttcggccgtgatcctgaaaaaatcgcgatcatgccggggatttttcccgtgattgccgatactgaggaagaagcgcaggcaaaatatgaggagctccaagacctcatcatcccgtctgtcggcctgaacattctgcaaaactatttgggcggcgtcgacctttccgcttacccgcttgacggcccgctgcctgaattggatgcggaagcgtcaaatgccgtgaaaagccgcttcaagctcgttcaagagatggccaagcgcgataacatgaccatccgcgagctgtacaaatatgtggcgggttcaagaggtcatcatatctttgtcggaacgcctgaacagcttgccgataagatggaagaatgggtcgacaaacaagcttgtgacggcttcaacatcatgccgccgcttttgcctgaaggtctcactctttttgtagataaagtgattccgattttacaagaacggggcgtgttcagaaaagaatatgaaggaacgacgctgagagaacatttcggactggaaaaaccggcaaaccgatatgccggctaaggagggctcatcatgtcaagacaataccggctcgcaacggaaagagacgctgatgaactgctttcactgacactgcgggcgtatgaaccgatccggaagctcggcataaactttgccgcagcaacggcggataaagagctcgttttgaataacatccaaaaaaacgcctgttacgttttggaggaagacggacggattctggcgacgatttccctgcggatgccgtgggggccgaatccagggccgtacggtgtccctcatatttggtggttcgccgtcgaccctgacaccggaaaaaaagggacgggctcagaaatgctggagtggctggagaacacggtgcttcgcgatactttaaaagcccccttcgtatcattgggtacagcagacaagcatccgtggctgatcggcatgtacgagcggaaaggctacgtccgtgcaggcgaaaaggatttaggaaaaggacacatcaccatctatttaaaaaaacaattgcagaattaacatattcatagaaaaaggcgggagttcaatgaaaaagaaaacatgggctttgctgctgtttgccgcgcttttggcggtcttatcagcatgcggtaacggaaaagaaagcgaagacggaggtaacgtgctgcatgtcggcgccacgggacaaagctatccgttcgcatataaagaaaacggcaagctgaccggctttgacgtggatgtcatggaagccgtagcgaaaaaaatcaacatgaagctggactggaagctgcttgaattcagcggactgatgggcgagctccagaccggcaaactcgacactatctcaaaccaggtcgctgtcacgggtgaacgcaagaaaacgtataactttacagaaccgtattcctatgcgggcactcaaattgtcgtcaaaaacgataacaaagacatcaaatcagtcaatgatctaaaaggaaaaacagtggcggccgttctgggctcaaaccacgcgaaaaaccttgagagcaaggacccggataaaaaaatcaacattaaaacgtatgaaacacaagaaggtacgctgaaagacgtggcttacggacgcgttgacgcttacgtaaacagccgcagcctcctgatcgcccaaatcaaaaagaccggtctgcctttgaaattggcaggagacccgattgtctatgaaaaagtcgctttcccgtttgcgaaggatgcggcacacgataaaatccgcaaaaaagtaaacaaagccattgaagaactgcagaaagacggcacgctgaaaaagctgtcagaaaaatactttaaagaagacattacaacggaagaaaagcattaagaaacggcggtgaaaatcgagaatgaacagcattgattggggatttatgttttcagcttttcccgcgttaatcgaagccttgccgatcacattagtaatggctgtcgcggccatggtatttgccgtgatcggaggccttatattagcgcttatcacgaaaaatcgtattcctgtgcttcaccagctgtcaaaggtgtatatttcatttttccggggcgtgccgacgctcgttcagcttttcctaatttattacggcctgcctcagctgttccccggaatgagcaagatgacggcgttaactgcggcgattatcgggttaagcctgaaaaatgccgcctacctggctgaaatttttcgcgccgcgctcaactcagtcgatgaggggcagcttgaagcatgtctttctgtcggaatgacaaaatcccaggcgtacaggcggatcatttttccgcaggccatcagaaacgcgcttcccgcaacgggaaatacgtttatcggcctgttaaaagaaacatcgctcgcctttacattaggagtgatggagatgttcgcccaagggaaaatgtacgcatcaggcaacctcaaatattttgagacgtatttagccgtcgcaatcatgtattggattcttacgattatttacagcgtgctgcaggatctgctcgaacgggcgatcagcaagccttatcgcacataggaggaggctcgggatgatacaagtcagacacattcgaaaagcatttaaagaccttactgttcttgacgggatcgatcttgagatcaagagcggtgaagtcacggccatcatcggcccgtcaggctcgggaaaatcaacgctcctccgctgtctgaatctgctggagcgcccggatgacggcatcattgaaatcggtgatgccaagctgaatgcagcgtcctattcgcgcaaagacgtacacaagcttcgccagcagacggcgatggtgtttcagaattacaacctgtttaaaaacaaaaccgccctgcaaaacgtgacagaagcgctgatcactgcgcaaaagaaaccgaaaaaagaagcggaacagatcggtatggatctgctgcggcaagtcggtttagagcacaaagcggacagctacccgattacgatgtcaggcggacagcagcagcggatcgggattgcgcgcgccctggccgttgatccccatgcgattttactggatgaaccgacttcggcccttgatccggagcttgtagccggggtgctccaagtcatcaaatcaattgccgaaaaacagacaaccatggtcatcgtcactcatgagatggcttttgcgcgtgaagttgccgaccaggtcatatttatggcggacggacgcatcatcgagcagggaacgccggaagagctgtttgacaatccgcagaacgaacggacgaaaaaattcattaagcaagtgggagagcctgccgaacttgtctaagaagggatgaagaaaaaatggcaaatgaaacgtatgaatcattaaacaaacgtttaatcaatatccgccgcgaccttcatgaataccctgagctgtcaggcgaggaatacgaaacgacgggtaaaatccgccgctggctggaggaagaaggtatctcggttcttgatgttccgaaacttcaaaccggagtgatcgctgaaatcaaaggcgacaaaagcggccccgtcatcgctgtcagagcggacatcgacgcattgccgatcgaagagaaaacaaacctcccgtttgcttcgcgaaacagcggcgtgatgcatgcctgcggtcatgattttcatacggcatctattctcggcacggctttcttattaaatgatagaaagcatgagctgaaaggaacggtccggtttattttccagcctgccgaagaaatcgccgccggagcgagacaggtcattgaagccggcgcccttgagggtgtatcggcgatattcggcatgcataacaaacccgatctcccagtcggcacggtcggcctgaaagaaggcccgctgatggcgagtgtcgaccgctttgaaatgaccgttaaaggaaaaggcgggcacgccggaattcccgacaacagcatcgatccgattcaggcggcagggcagatcatcggcggcctgcaatcggttgtcagcagaaatatcagctcgctccataatgccgtcgtcagcatcaccagagttcaaggcggcagttcttggaatgtcatcccggatcgtgttgaaatggaagggaccgtccgtacgtttcaaaaagaagcgcgggaagctgttccgaaacatatgaagcgggttgctgaaggaatcgccgccggattcggggcagaagctgaattccgctggtttccttacctcccgtcagtcatgaacgacgcccgtttcatacagacggcggaacaaacggctgaaagcctcgggcttcaaaccgttcgggcagaacagtctcccggcggtgaggacttcgccttatatcaagaaaaaatccccggcttcttcgtttggatgggaacaaacggaacagaagaatggcatcatccagccttcacactcgacgaaaaagcgcttccggccgcggctgagtttttcgcccggcttgccgtcaatgtattggagcagacggaatgaatacggaaaatctgacggccgggcttgctcaggccgtcatgtcgtctgtgccggaaacatccgccgaagcgatgaaagaagcgcgcaaagggctgcttgattttacagcggcagcctttgcgggaagacgggataaaggcattgagaaactgataaagctggccgaagaagaaggcggagcgccgatagctccgcttatcggcagaaaacaaaaaacaacgccgtcccaatccgcgctgattaacggattcatcgcccatgcgcttgattttgacgatgtccattctgatgtaagagggcacccgagcgccgtcatccttccggctctgattgcagccgcatcatcaggccgtatagacaagagccgttttctcggtgcttacgtgacaggaatcgaagtgatggcgcggctcggtgagtcatcgggaagatctcattacgaaaaagggtggcacaatacggggacgttaggcgcgattgcggccgcgtgcgccgtcgggtttgcggagaacctgaatcatcatcagttgcagaaagcgatcgggtttgcggccgcccgttccggaggcatgcgtgtgcaattcggaacggaaatgaagccgctccatgccgggctggccgctcaagccggattgttcgccgtcaagcttgcgcaggccggttttggcgggtcagctcatgcgcttgacggggagaaaggctttttcgggctgtacggcgatcttgaacgggcagaaactttgcttttaaacggatggggaaaaccttggcggatcacgagcccgggactttggtttaaggtgtatccgttttgctcggctgcccatcatgcggcggacgccattctcaagctgaaggccgagcacggtctcaccttcagccaaacggaacgggtcgacgtaatttatccgcctggcggggacgccgcattgacagaacggcgtccgaaaaccggcgaagcgggacggttcagtgtggaatatgtgatctcgttagctttgcacggtaaagatctttcagctgaacatttcacatccgagccgattccggaattccttcaaaaggggttcgcgcggattcaccgcggctatgatgatcaaattcagccggctgacaacgccgttccgaagggccgttttacaattgtacgggttacggctgccggcaatcatgtgtatgaagcgcgtatcgactgtccgaagggtgcgccgggaaacggtctttctgaaaaagacattgaagacaaactcaggctcgctttgccaggagaagagaaaagagcggcagagttgatcaaagcagccggacagccgaatattgaacgttatttacagctgatataaataaaaaaagcgaggggatgcagccctcgctttttttacgttcacttctattgaatagggggatatagggtgcgcccctgtctgcgctggcaggggcgcggtttcaggaaacggctgtgccgttttcttttacggtgaaacttcctcttgataagcggatgttgatatccgaaactttggaaatttgttcatcatgcgtgaccatgatgacgcatttgctgtctttatgcgccagatcctgaaagagccggacgatttcctttgacgtatcctcgtcgaggtttcccgtcggctcgtccgcacaaattaaatccgtgtcacagcagaaagcccgcgcaatcgaaacccgctgctgctgtccgccgcttaatgtcagcacccgctgccgggcctgctgttccgtaatacccactctttccagcatgctgagcgcgaacgcatctttgtttttctctttagatccggtaatctccatcgccgttgtgatattctggagcgctgtcatatacggaatcagattataagattgaaagacgatagagacatattgatttctgaatttggtcagtccgattttggagatatcttctccgttataaaggatgcttccctctttaggtgtgtcaagaccgcccgccagagacagaaacgttgttttccccgttccggaggcgccgacaattgtataaaacttccctttttcaaagctgatcgttatatcctgaaacagcggctgtgatttgtcttggtaccaatagccggtctgttgaaaggttaataggctcattacgctgcctcctcttattcctgcttggtcaggatggttttaggatgaagccgcatgactgatacagacggcagtaatgtggcgatgacggcaatcgcgatgccgataccgccaagaatcagaaggtcattcagcgagacgtttacctgcatcgtgctgatgacgtccgtgcttgatgaatgccggccgaacataccgcctccgcgcggcatttctccgccgccccagccgcttgcttgctgctgtgaatcatcggctgagctgacctgctgagaaagaagctggtttccgagctgattcgctacaaggctgcctgtgacagatgcgataccgatggcgatgacggcgaccgccagtatttccgttaggaattgtccgatgagcttccagcgtttttcgccgatcgccattaagacacccatttcatacttgcgttccctgatcgacatcatcacgattaatccgagaatgaccgcgcccgcgatggatacaagatacaccacgtttttagaaaacgacgcgacattttcaatcgggccgaccatttgctgatacacctgatcattcgtcgtcagcgtgtacgttttataatctatggatgtttttttcgcagccgcaacgaatgagtcaatatatttggcatcatccatgtaataaacggctgagctgattttgtttttgttgtcagatccttttaacgccgctgcggcggtgtaaggcgtatagattttgttatcaggatttaagaatgaaaaatgctgtgcctgatcatctccggaagatgttgttttatagattcccacaattttaagcttcgttttcaccgaatcatctgatgctgaggaaacggtaatggagccgccgaccttcagcttgttttgatctgccagtgttttattgatcactgcgacttttgcgtccgcatctgtttttgtgatggcgcggccgtccgtgatttttgagctgccgtccgtgaaatcgtcaagcagtgccgtagagagcacgccttcgatcgaaatgtccgctgacatcatctgtcttccgccgccttgaaaacggcttccgccggaattgttatcggctgatgcgtctgagctttctatcgcgtcaaagctttctgcgtttgctgacgctgtcgtgagaaagttgtaatttttcacgtgctgtaaagatgtaagcttcttggcatccgagacggaaatcggcgttgattcaaacgtccttttttcaccgtctttttgctgctgcgccatttgcttttggcggtcaacctggagtgtgacactcccgccgagctgctgcctggccagttcgcttgatttctttgccgctgactggatcgtaaggccggacaggacaaaaatacaaatcaccgaaaacacaatcagctgcaataatgtttttcccttttttgccttcatgctccaaaaggctctttttataaaattcatgtctgttcctccgtgtgggtgtcagatcttgtaaaaccggccttctttagcaccggtcatccgatatgtatatagtaggagaaatgtatgaaaaaaatatgaacaaactatttccgggtgatgaaataaaaactaacaattgtgaaacgggaaaacatccgggtaaaatggtgctattataagaaaaagcttcaagataagcggaggatacaatgaagatattaatgatagaagacaatataagcgtatgcaccatgacggaaatgttcttttttaaagaaggatttgaagccgaatttgtccatgacggagtggaaggctatcagcggtttacggaggaggactgggatttggtcattctggacattatgcttccatccatggacggagtgacgatctgccggaaaataagagagacgagcagtgtgccgattattatgctgaccgcaaaggacactgagtccgatcaggtaatcgggtttgaaatgggggccgacgattatgtcactaagccgttcagcccgctgacgcttgtggcgcggattaaagcggtgatcagaagataccgggcgacggggcaggccgtaaaaagcgacgacttgatcgaaacggcatgcttttcaattaataagaagacgcgggaagtgtttcttcacggaaaatccgtcgagaatctgacgccgaaggaatttgatctgctcttttatctcgtacagaacccacgccaggtcttctcaagagaacagctgcttgagcaggtgtggggctatcaattttacggtgatgaacgtactgttgatgttcatattaaacggctgcgtaaaaaactgtccagtgacgaaaaaccgtttttgtacactgtgtggggggtaggatacaaatttgatgaggattaaatacttatatcagctgctgctgagccatgtcagcatcttgattttggcctttttcatcatcatttccctgttttcgcattttgtgaaagattttgcgtatcaaaacaaagtggatgagctgtcatcctatgcccaacagatcacaagtgagctgaacggccgcgatcttgatctgcgccgtttgtatccctatcaggacatgttaaaaacgcgcgagacccggtttattatttttgatgaacatcagcggccttacttttttcctgatgatatgccgccgcgtgagaagctcaaaaataaagagtggcacatgctgaagcaaggcaaaaccgttcagatcagagcggagatgaaccgttttaatacggaaggcttagaagtctcgcttgtcgcaaagccgctttttatcaacgatcaatttaaaggcgcggtgctgctcgtgtctcccgtcagaggggtcgagcagatgatcagccaggtcaaccgttatatgttttacgcgatcatcagcacccttatcatcacgatactgttaagctggcttctatctaaattacacgtcaaacggattcagacattgcgggatgcgaccggaaaagtggcgtccggtgattacgatatatcgcttaagaacagcggcggtgatgaaatcggcatgctggcgtccgatttcaatacgatggcccataatctgaagcaatcgcgagaacagattgaccgccttgaaaagcggaggcgccaatttatcgccgatgtttctcatgaactgagaacgccattgacgaccattaacggacttgtggagggactcaacagcaacaccattcccgaaaaagataaagagaaatgcttctctctgatcagtgaagagacgaagcggatgctcaggctcgtgaaggaaaacttggattatgaaaaaatcagatctcagcaaatcaagctggacaagctgagtctgccgctcatcgaagtgtttgaaattattaaagagcatctcaatcagcaagcggaggaaaaacaaaatcggctccggattcaagtggaggccggcgtcaaagtgttcgccgattatgacaggctgatccagattctcgtcaacattacgaaaaacagcattcaatttacgcaaaacggagacattacgctgcgcgggtatgaaggctataaggaaacaattattgaaattgaagacaccggaatcggtatttccaaagaagaaattgagcatatatgggagcggttttataaggcggacgtgtcacgaacgaatacggcatacggtgaatacggtctcggcctgtccatcgtgaagcagctcgtcgaactgcacaaaggcacgatagacattaacagcgaaaagggacaaggcacaacctttacaatccgccttccgctgaatacgaaaaatgaataatcttgaaaccggcagtctgtttggctgccggctgttttatcttcccttcgaaaaattgcgctctgccgaaacaaagtttgcgtgtttttcgggatggaaagacacggaaacgtgataaaataactggtaaacaggtcttggatggggagggtgaaggaatgaagagcgggttaattccttcttcagcagtcgggcagaagattaacgagtggtaccgatacataagaacattcagcgtgccggatgcagagatcttgaaggccgagatcaaacaagagcttgaccatatggagcctgattcgaacttagtactttattattccctcatggaatttcgccatcagctgatgctggactatttggagccgctggagaaattgaaaatagaagaccagccgaccctgtcggaaattctcgataacatagataacagccaggccgggctcaaagggcttctcgattattacgtcaactttttcaaaggcatgtttgaatttgataaaagagaatttatatcagcgatcacgtattataaacaggctgagaaaaaattggccttcgtatcggaccacgtggagcgcgcggagttttattttaaagtggccgaagcttattatcatatgaaacaaacgtatttttctttgatacatataaaaaatgcttatgaaatttacgtagagcaggacacatacaacgtccggatcattcaatgccattttgtgttcggcgtcaatttaatggatgaaagacgttttgaacaggcggccaaacattttcagcacgctctgcaaatggccgaaaaagaacaaaaagcgcagcttgtcgggagggcgctgtataacctcggactgtgctactacaatcagaaccgcatcgatgaagccataccgtactttgaacgggcagttgatacatttgaatcacaaagaatcgtcaattctctccctcaggcatattttctaatcacactcatttactttaaactcggaaaaaaagataaagcatcggaatatcacaagcggggatatgaatatgctaaagaaacagacgatcccgtttacacggtaaaattcgaatggctgcaggctctgtatcaggcgaaaccggatgaggaaaaaatcagcgcatgtttccgttacctcgaagataaaaatttatacgccgatatagaggatttagcactagaagcagctaaatattactatgaacaaaattgctttaaaatttcttctgactattttctgaaagtcgaagaggcaaggaaacaaatacaaaggagtgagggtttgtatgaaattgaaatctaaatggtttgttatttgtttagcagccgccgcgatttttacagctgcaggtgtaagccagacagatcaggctgaattccatgtggctgaaagaggaatgacgtgagaagaaaataactgaacaaaggaaaagactgcctgagaatgatcgcggcagtcttttttgtgtgtccggatttgggcagcggcggaaaacaaaaagaaaacgccgcaggtcaaaacccgcagcgtcttcatatagacggagtgatgtttagtaaccgccgacgaaggcagtacctacaattactaacaggataaataaaacaacgatcaaagcgaaagagctgattccgccacctgagtatcccatcatttgcttcacctccatattgtctataccatacaatatgtttcagaagctgttctgtaagggatattagtggacaagagaaaaaagaggctgtttcctatgagagtaagaccccggcgaaaaattcgtcatacagtgcccgcaccgcgtgtttttcctgttcttctttcactccgaacatcatactgacttccgatgacccctgattgatcatctcgatgttgacgccggctcccgacagcgctttggatgccctggcggttgtgccgacattatggcgcatcgcttccccgacgaccataatcagcgccagattgtgcctgacagtgacttcatcagcttgaagttcctgcttcagacgggtgacgagcttctgttccagttccgaatccatctgattgtgccgaagaatgatcgtgatatcgtcaatgccggatggaacgtgttcatacgtcaatccttcttcctccaaaatatgaagggctttgcggccgaaaccgatttcccggttcattaaatatttgcttatgtaaatgctgcaaaagcccgtgtcgcttgcgatgccgatgaccggcccgttcgtgttgtcacggctgctgacgacgcgcgttcctttcgcatcgggattgttcgtgtttttaatctgaacagggatgccggcacgaaatgcgggaataagcgcttcatcatgaaaaacggaaaacccggcataggagagctcacgcatttcccgatacgtcagttcgttaatttctttcgggtgcggcacgattgacggattgacggaatagacggcgtccacatcggtaaagttctcatacaggtcggcttttaggccgttggcgagaatggagcctgtaatatctgaaccgctccgggaaaacgtcacaatctcatgctccttcgtatatccgaaaaatcccggaaaaatgatcaatccttcgcggtttctcagacggtataaatgatcataagactcaggaagcacctgcgcgctgccgggctcattcgtcacaaacagccccgcttctttcgggtttacgtattccgctttcacgccctgcctgcggaagtaggctgcgatcagcttcgcgttattgtcttcgccgctcgctttcaccgcatccatataccggtcgggattggttttgcagctgtttaagagagcgaataagtcacgacggattctttctataatagagaaatccagatccagctcgcgcgcgatggcggcgtaccgctcaatgaccgtttcggcaagctcgggcgctgctcctttttgcaaataatgctccgcacagcggattaacagatccgtcacctttgtatcgttcgagaagcgttttcctggcgccgatacgacgacggctttccgcgcgggatcggccgtcacgatttgaaacactttctcaagctgggctcctgacgctagggagctgcctccgaattttacaactttcatgatttacatcccctaatgtttaaattttctcacaaatttaatttttattatctctctttcgaacatgtaaatcaaggattttttcttctcgaggagtacatttgtatttatggagaggaattcagctgctttctgtcagatttgcttcctcaaagcgtgtaatcacgtgtgaaaaatgataagcctccaaatgtaggttatagaaaatcctgcaaattattgatagactgattgtaagacaatttagtgtacggcccgcggatgaccgcttttgaagcaaaaccgtattgactgcgcttggaaagatgataagattatagttgtcgttgataatgataatcattacgagtggggatatatgggagttgtttggcaatgagtcataccgtttgtgatgggttcagggaggcagcatgaagctacgttacttacttttgttactggcggtattggcgtgtacttctatttttatcggggtagaagatttgtcgccgctggatatttttcatttaaataaagaacaggcaagtacattatttgaaagccggctgccgcgtctggcgagcattattattgccggcatgagcctgagcatctgcggattaattatgcagcagatcagccggaataaatttgtatcgccgacgactgcgggaacgatggactgggcgaggctcggaattttgatttcattaatgctttttacgtcagcgagtccgcttgtgaaaatgtcaatcgcttttattttcgcgttggcgggaaatttccttttcatgaaaatcctcgagagaatcaagtttaatgatgcgatttttattcctctcgtcggtttaatgcttgggaatatcgtcagctcaatcgccacgtttatcgcatataaatacgatctgatccaaaacctgtcgtcttggcttcagggggatttctcattggtcgttaaaggccgctacgagcttttatacctgagtatcccgctggtgatcatcgcttatgtgtatgcggataagtttacggtggctggaatgggagagagcttttccgtcaatctcggcctgaaatacaaacgcgtcgtcaatatcggtctgatcattgtgtcgcttatcgcttcacttgtgattttgaccgtcgggatgctgccgtttctcggtttgatcattccgaatatggtgtcgatctacaaaggggacaacctgaggagcagcctgcctcacacagctctgttaggtgctgtttttgtgctgttttgcgacattttgggaagggtgatcatattcccgtacgaaatttccatcggcctgatggtcggtgtgatcggcagcggcatcttcctgtatatgctgttaaggagaaaagcatatgagtcataataaaaaaattacgctgctggcggcgctcgccattatatgtatcggattctttctgttctacggattgggcaattgggaatactccctgccgagacgatgcttcaaagtgcttgccatgatgctcaccggaggagcgatcgcattttcaacggtcatcttccagacgattacaaataaccgcatactgacaccgggcattttaggcctcgattccctgtatatgctcattcagaccgtcatcgtgttcctgttcggttcaatgaatatcgtcatgatgaacaaaaaccttaatttcgtcatctccgtcgggctgatggtgctcttgtcactcgttttgtatcagctcatgtttaaaggcgaggggcggaacgtgtttttccttctgcttgtcggcgtcgtgttcggcacgctgttcaacagtctgtcatcgtttatgcagatgctgattgatccgaatgagttccaggttgttcaggacaaaatgtttgccagctttaacaatatcaacaccgatcttttaggattcgccggtgctgtctttcttctgacaggcatttatgtctggcggttcacgcggttctttgacgtgctgtcgctcggccgggaacacgccgtcaaccttgggattgattacgataagcttgtgaaacagatgctcattgtcgtcgctatacttgtgtccgtctctacggctcttgtcgggccgatcatgtttttagggctgcttgtcgtcaatctggcgagagagtttttaaaaacctacaggcacacgtatttaattgcgggttctgttctgatcagcattgttgcgcttgtcggaggccagttcgtcgtggagaaagtgttcacgttttccacaacgctgagcgtcatcattaattttgccggcgggatttatttcatctatttgctgttaaaggagaataaatcatggtagaggtcaaaaatgtaagcaaacaatacggcgggaaagtcgtccttgagaaaacgtctctttccattcaaaagggcaggctcacctcgtttatcggtccgaacggcgcgggaaaaagcacgctgctgtctatcatgagccggctgattaagacggattccggagaaatcacggttgacggacaagagatcgggtcttgcaaaagcaatgatctggcgaaaaaaatcagcatcctgaaacagacaaatcaaatcaatatcaggctgacgattaaagacctggtcagcttcggacgatttccttattctcaaggaaaactgacggatgaggattgggtgcatatcaaccaggcactcagttatatgaagcttgatgacttaaaggataaatatctcgatcagctcagcggaggacagtgccagagggcgtttatcgcgatgatcatcgctcaggataccgactatatttttctcgatgagccgctgaacaatttagatatgaagcattccgttgaaatgatgaagctgttgaagcggcttgtggaagacttcggaaaaacggtcgtcgtagtgattcacgatatcaacttcgcatcagtatattcagaccatatcgttgctttgaaaaacggccggatcgtcaaagaagggccggcggaggagattattgaaacctctgtgcttgaagagatttatgatatgaccatcccgattcaagagattgacagtcagcggatcggtgtgtatttttcttaaaaaccagatgaggtgaaagtcatgaaaaaattcgcattgcttttcattgcgctcgttacgatttttgttgtttctgcatgcggaaacggaaacggggacaaaacatcaggcaaatcaaaagaaacaatcacgattaaggatgacctgaacaaagaaggagtcaaagtgccgaagaatccgaagaaagtcgtcgtattcaacttcggaatgctggatacgatggatgaactcggtttacaggatcatgtcgcgggacttccgaaacaaagcattccaaaatacttatcttcatacaaaagtgataaatacgccaatacaggcggtttaaaagaaccggatttcgaaaaagtcgcggatattgatccggatttaatcattatcgctcacagacaatctgattcttacaaagagttctcaaaaatcgcgccgacgatttatcttgatgatgactatacaaactacgttgacagattcaagcataacaccgaagtgatcggcaaaattttcaacaaagaaaatgaagtgaaagataagcttgcgaaaattgacaaatccattgctgatctgaagaaaaagacaagcagcacggataaaaacggtttagtggtgatggcgaacgacgggaaaatcagcgcgttcggatctaaatcaagatacggcttcattcatgatgtgttcggcgtcaaaccggctgacaaaaacatcgaagcatcactgcacggacaaagcatttcctatgaatatatcgccaaaacaaaccctgattacttgtttgtcgttgaccgcggaacagcgatcggctcaaaatcttcaacaaaacaagtggttgaaaatgattatgtgaaatcggtgaaagccgtgaaaaacaaccatgttgtataccttgactcagctacatggtacttatcaggaggcggcctggaatccatggcgcaaatggtgaaagaagtaaaaaacggaattgagaagtaaaaaagaacccggtcacacaagtgatcgggttctttttcgtttagcgcgtgacggcctgctgctgctcgggctgacgcggttttttcttcaaagtaaaagatagcaggaatccggccagcgcgatgcaggcagctacgacaaatgccgcattcatgccgtgcagggcggcgtttgccggagacgacgcatttgcgtgcgcggcctggctgctcataacggaaacaagcagcgccgtaccgatagaaccgccgacttggcggacggtattgttcatggctgttccgtgcgggattaagtggcgcggcagggcgttgattcccgctgtcgtcaccggcatcataatcatggctgttcctaaaagccgcgcggtgtaaacgacgacaatccaaatgagagaagtcgagtctgtcagattcataaacggcagggacgtgagcaggataatgaagaatccggtcatcgcaaggccctttccgccgattttatcaaaaatccggccgataaacggagacatcattcccatcacaattgcgcccggcaaaagcattaatccggtatcaaacgcggatacgccgcggaccttttgcgtgtagagcggaagaatggtttccgtaccgatcagcagcgcgaaaacaagcgtgccgagcagggtggtcaggctgaaaatcccgaaggaaaacacgcggaattccagcatcggttttttgagcttgatctgtcttgcgataaagaaaatcagcgcgaccgctccgacaagcagcgaggtcagcacttcagtactggtccatcctgatgagccggcgcttgagaaaccgtaaagcagaccgccgaatccgagtgtcgataagatcacggataaaatatcaatctgtgtttttcgtaatgtcgtgacgtttttcatcagaataattgctaaaagcaaatcgatgactgcgatcggaaagataatataaaacaaagaccgccaagagaatgcttcgaccgcccatccggaaagcgtcgggccgatcgccggcgcgaacgaaataaccaagccgaccattcccatcgcgcggccgcgtttttccattgggaaaatcgtgagaaataccgtctgcatgagcggcagcataattccggcaccggccgcctggataatccgggccgttaataataccggaaagttcggggcgaatgcgccgacaatggtgcccgctgtgaaaatactcatggcggaaatcaagagggtgcggctggtgaatttctctattaaaaatgcggaaatcggaatcaaaatcccgtttgtcagcataaacgacgttgtcagccattgcgctttgttggcgtctatattgaagtcattcataatatgaggcagcgccgtgataagcagtgtctggttcaaaatggcgacgaacgctcccgccaaaagaatcccgacaatgacagagcggttgtatggtgcagtttcaatactcttattcaagctgattccttctttctttatagtttgagcaatgttttaacggctgcaagcggctggtgcagcggtccggcctgttccaaataaccgatgagcgcttttaagaggaaatcccgcggctgtttgtccgctgattctttctccagcatggatgccgcggaggcgagccctgcggcatcgtatttttcctccggaagagctgagacggcttctttcagctctttcaggctttcagccagcaatacggttttgcctttcggctcaaatgaggaagcggaggcgatataaaggtcaatcatctcctgaggcaaagcggtttcggttttcctgttttcaacgatgagattgaggtggcggatgataaactccgtgagcggctccagggcgagcggttctttttccagcttaatcagcgtgatgcattctctcaaaagcccctgaaggacaataaccagctcccatacataaggaatgatctcttcgccgtacgtctgaatcagtgaatctcgatgccagcagataaagatggagcgggccctgtgaatatgccgttttacccgttcattaatagaggaagggcttccgtacatcagcatgttaaagaactgctgattgcgcctgaaaccctcaagctcagccatcagttttttggcaaaccgttcttcaggggacaggcttgtttcttcatttaataatgaggcagccgctaccatctgtttctggttaaaatcaagcagctccaagagcagatcttcctttgattcaaacagcttatataaagatgctttggagactttgcactcctcggcaatcgcctgcatcgaaaccgacgaaaaacttttctcagaaaaaagctttcttgccgccagcagaatatccgttttcttatcattcataagcccagattccttctttcgtcacaatagaaaacccatcggttcacagaaaaccaatgagtatatgatgaaaatattaacaaaaatttttacacagtgtcaacgcttttgtttgcgaaaaagaaaaagcctgccggagtgtttccggcaggctgatgcgcttatttatccgtcttaaacccttgtttttcaagcatttcacgaatgtgaggataataaagctgtttatagtaggaggtgatgccttgtgaccagtttcttgtttcctgtccgccggtgcggttttgcatgtattcggacatctgcttgtcataggcctcaatatgtgttcttaaaccttcctcttgatacgtttcatgatgaagaacggctgcttgcggcagacgcggttttttcgcggagcggtctgccggatggccgatgacgagaccggaaaccgggaaaacgtatttcggaagtttcagcaattcaatcagttcatccggcttgccgcgcacggcgccgatcggcacagtgccgagtcccattgattcagccgcagctgttgccgtaccgagcgcaatcccgacatcaacggctccgacaagaacggactctaaaccgttcgttacctcaagcggtgtatcattatattcttcaagcgcaattttggcacggttaaaatcagcgcagaataataagaaaaccggcgcttggtcaatccacggctggccgccagccaattcggatatttttttctttcgttctttatccttcaccgcaataacggtaaattgctggccgttaatggaggtcggcgctgcttgagccgcttggatgataagatccagctgttcatctgatacgggctcatcggtgtagctccggatggaacggtggtctgttaatatttgaaggacttcgttcatgtcattcatcctttcgttactctgatagctctgtgcgtacgacatcaagcggcgcactcagcaggtctttggcttttgccacgaatccttggaaatggtcagtggcgttgtgggatttcatcgcttcttcatctttccattgctcaagcatgacgaaagtattttcctcaccgatcttttcgaaaaggtcgtattgcacatttccttcttccgcgcgtgaatgctgaacaagtgattgcgcttctcctaaaaattcctcgcgtttatccgcttttactttcatgtaggcctgtaaaacgatcattgttattcctcctgattgggtttatttgttatagttcgaatattatcgaactaactgtaacatgtatcgccgcgcaaggtaaagaaaaaacccttacggcctaaattgtcacccgccgcttatatgtgttacatttgactcatgaacattccaaaccatcctgaaaccgcccgcttacagctgacaaaggttcttcatgctctgagtgatccgctccgtttagagctggtcaaacagttggcggaaacaacagaaaaaacgtgcagcacatgtgctgatgtccgggtcgccaaatcaacgctgtcccatcacttcaaagtgctgcgggaggcgggggtcgcccaagtgcgcatagacggaaagcaccgttattattccctgcgcaaagatgatttacaagaggcgtttcccggcctgctggaggcgattttacagacagagccggaccgctggtaactaaatccccgaattccgggggtttttttatgcgccgaaaaccgcccggtacagccttgtaacgccttcttgaatctctttctccttcagacgggcgaatcccaggatgagctgaggtttgtttgattcgccgcccgctttcaggcggaaccggctcatcgcaaacaggtcgagctgttccgcatccgcccgtgccaatatctctttttctgaacgggggcagtcaaactcaatgacaaaatgaaggcccgcattggcgccctttacattgattctttctccgaatgtttcttccagggccgaaatgagacgctcacgcatgttcttataatgctgcttcatcttcttaatatgtttctgatattcacctgaatcgataaattctttaagcgccagctggccaagcgtgctgcacgtatgcaggtcatacgttctttctttgaacgcccgcaaaagtccgggcggcagaaccatgtagctgatgcgcaggccggggaaaagggattttgaaaaggtccccatgtagatgacgttttgaaaccggtcaaggctttgaagcgccggtatcgtgtcggcgtcatatttaaattcactgtcatagtcatcttctataatgaagcggccgtcctgttcggcggcccagtttaaaagctgaatccgccgggaagcgggcatgatcacacctgagggaaattgatgggacggcgtggtgatcaatacacagggccgctgcttttcgatttcggccatagacatgcctttttcatcaaggctgaccgtcgccgtctttttcccgaggttttgcagcagccggtacatcctcatatatcccgggttctccatggcgtacagcgcgtcttttggcagcagttccgtcagcagctgcatcagcatttgcgtacccgccccgagcacgatttgctccggccggcatgtgacgccccttgtcagagaaataagccttgagattgtttcccggacttcatataagccttgcggatggacgagttcaccaagcgtatgaaatgaacgggcggctgctttctgctcacagcgaaaccagcttttcagggggaaatgagccgtatccacgctcatatgtgaaaacgaaatccagccgcttttgtccggttcccgttctctcaaatcgtcaggcaataagagcgacggcgcttcttcgtgataaaacgtatcaatttcctcaacgaaaaagccttttctttcgactgcatataaataaccttccgaaagcagctgctgataagccgaattcactgaattcacgctgaccttcagcgtctcggcaagctcccgtttagacggcacctttgtgtgaggcatcaggctgcgcttcaaaacggccgcttttacgtgctggtagatctgctgatagatataatccgccgtttccgaatgatcaatggaaattgtcagcatacagaccctgacccctttctgataccatggataaattgattttggtacttttcatcataccaaaaagaagtcagaatgataagaaaacaatgcagggggatgaaatctatgagtcaaacagtatcatctgaagtgacaactgcccagtggcagcaaaaacgggatcaatttgtttccaatggggtcggcaacggaaaccgcagtatggcggtaaaaggcgaaggggcgcttttatacgatttggacggcagacgattcattgattttgccggagcgatcggaacgctgaatgtcggccattcccatccgaaggtggtggaggccgtgaagaaacaggcggaggctctcattcacccgggatttaacgtcatgatgtatccgtcttatattgagctggccgaaaaactctgcgccattgcgccgggagatcatgcgaaaaaagcgatttttctcaactccggagcggaagcggtggaaaacgccgtgaaaatcgccagaaaatatacgaagcgccaggctgtcgtctcattcacaagagggtttcacggccgcacgaacatgacgatgagcatgacgagcaaggtaaagccttataaattcggattcggcccgtttgcctcagaggtgtatcaggcgccgtttccttactattatcaaaagccggccggcatgagcaatgagcagtatgacgactttatcatcagcgcttttgatgatttctttatcgccgcagttgcgccggaaaccgtggcctgtgtcgtcatggaaccggttcagggagaaggcggttttatcattccttcaaaacgtttcgtgcagcacgtcgccgctttttgtaaaaaacacggcatcgtttttgtggcggatgagattcagaccgggtttgccagaacgggaacgtattttgcgatcgagcatttcggagccgttcctgatttgattaccgtatctaaatcactcgcggccggattgccgctgagcggcgtcatcggccgggcggaaatgcttgatgccgccgcgccgggggaacttggcggcacatatgcgggaagccctctcggctgtgcggctgcgcttgccgtcttggacattattgaagaagaagggcttaatcagcgctccgaggagatcggccgcatcattgagcatcaggcgctcgaatggaaaaaagagcatgcctgtatcggagaagtgcgcagactcggcgcgatggcggccatcgaaattgtcaaagatccggacacgcgagaaccggacaaagcaaaagccgcggctgtcgcaaaagcggcgaatgagaatgggctgctgctattgacggcaggcattaacggcaacattatcagatttctgacgccgcttgtcgtgacggatgaacagctcaaagaaggcctttccattatcgaagccgctttgtgagttcaattattggaatgccggcggatgggtctgctatcatgagagtgtgagatacatcaataagcattcaatggttttactatagcagagaaaggaatgttcaatatgccagaacaattaacagtttacaacccggcaacgggagaggcgatcgaaagcatccctcagcagacggccgaagatgttgaaaaagcgattgaacgttcacacaaagcgtttcaatcatggtccaaaacatcagcgggagaacgtgcttcccttttgaaaaaatggtatgagctgattgttgaaaataaagaagaacttgcggaattaattacgaaggaaaacggtaaaccgtatgaagaagcggtcggagaagttttatacggcgccggctatattgaatggtttgccgaagaagcaaaacggatttacggcagaaccgtacctgcgccgactacgggcaaacggattgtcgtcacccgtcaggcggtcggcccggtagcggcgatcacgccgtggaatttcccgaatgcgatgatcacccgaaaagccgcgccggctttggcggcaggctgtacattcatcatcaagccggcggaagatacgccgctttccgcttacgcccttgcgcgtctcgcatttgaagcgggaattccggaggacgtgctgcaagtggtgatcggtgacggagccgaaatcggaaacgtctttaccagcagtccgaaaatccgcaaaattactttcaccggctcaacgcctgtcggcaaaatcctgatgaaaaacagtgccgacaccgtcaaacatatgtcgatggagcttggcggacatgcgccgctgatcgtggatgaagacgctgatcttgatctggcggtagcccaaacaatggcctctaaattcagaaatgccggccaaacctgcgtctgtgcgaaccgcctgatcgttcacgaatccgtgaaagacgagtttgcgaaaaaactgagtgaagaagctgcgaaactcaaagtcggaaacggtcttgaaaaaggcgtaaacgttggtcccgtcatcaacaaaaaaggcttcgataaaatcgtcggccaaattaatgacgccgtggaaaaaggcgcgaaagtgctgacgggcggaacgtatgaccaaaacgatgaaaaaggatgctatttcgttacgccgaccgtgctgtcaaatgtagacacatccatgaacatcatgcatgaagaaacattcggtccggttgcgccgatcgttacgttctcagatatcgatgaagcgatcaagcttgcgaacgatacgccgttcgggcttgcggcttatttcttcacagaaaactaccgccgcggcatctatatttctgaacagcttgaatacggcatcatcggctggaacgacggcggtccgtccgcggttcaagcgccgttcggcggaatgaaagaaagcggcatcggccgagaaggcggtacggaaggcattgagccgtatctcgaaaccaaatacatgtcaatcggactttaatagctgaaagagagcccctgcttctaagcgggggcttttttaattgagcagtctgccggtgaaatcgccggcaggcttttttgatctcatgggaataatcggttcgattccagacaaaataacagcaaatacgattgaaagaaggtcgccatcatggatatattactggctcttctcccggctttgttctgggggagcatcgtgttatttaacgtcaaattaggcggcgggccttacagtcagacactgggaacgacaatcggggcgctcatcgtttcgtttgtgttatatctgtttgtccacccggtgctgtctgtgcggatctttattgtcggcatcgtatcggggctgttttggtcgctcggccaaagcaatcagctgaaaagcatacagctgatgggcgtttcgaaaaccatgccgatttcgacgggaatgcagctcgtctcgacttctttattcggcgtgatcgtattcaaggaatggtcaactcctatcgcgattacactgggtattctcgcccttatttttatcatcgtcggtattgtgctcacatctttagaagataaaaaggggcgggcggacggagaaccgggaaacttaaaaaaaggcattgtcatcctgcttatttccacgctcggttatttggtatatgtcgtcgtggcccggctgttcggagtatccggctggtcagcgcttctgccgcaggcgatcgggatggtaattggcgggctgctgctgacgtacaagcacaaaccgtttaataagtacgccctcaggaacattctgccgggaatcatctgggcgctcgggaatatgtttctgttcatctcacagccgcgcgtcggtgtcgcgacaagcttttctctgtctcaaatgggaatcgtcatcagcacgctcggcggaatcttcattctccgtgagagcaaaacgaagcgtcagctggtcgccattgcgatcgggattatcctgatcatcgtggccgcggtattcttaggcgttgcgaaatcaaattcataacaaatgcaggaggtttgaacatgtacacggatctaaaaggaaaagtcgttgccattacaggagcatcatcaggattaggaagagcgatggcgatccgcttcgggcaggagcaggcgaaagtcgtgattaactactacagtaatgaaaaagaggctcaaaccgtaaaagaagaagttcaaaaagcgggcggcgaagcggtcattattcaaggtgacgttacaaaagaagaggatgtcaaaaacattgtgcagaccgcggtcaaggaattcggcacattagatatcatgatcaacaacgccggcatggaaaatccggtcgagtcgcataaaatgccgctaaaagactggaacaaagtcatcaacaccaacctgaccggcgcttttctgggatgccgcgaagccattaaatattacgtagagaatgatattcaaggaaacgtcattaacatgtcgagcgtacatgaaatgattccgtggccgctgtttgtccactatgcggcaagtaaaggcggcattaaattaatgacggaaacattggcgcttgagtacgcgccgaagcgcatccgtgttaacaatatcgggccgggcgccatcaatacgccgatcaatgcggaaaagtttgcggatcccgttcagaaaaaagatgtggaaagcatgattccgatggggtatatcggtgagccggaagaaatcgcggctgtcgccgtctggcttgcttcaaaggaatcaagctacgtgaccggcattacgctgtttgctgacggcggaatgacacaatatccgtcattccaggcaggccgcggataagaaaaaaagcgatcgcagctcttatgagccggatcgctttttgctttatgcgcgttttttcttaacaagcgccgcgatggaaaggataatcgccgcagctgacagaacgatggccgcgatatcaagcgctgatacgccggatttgctttcttcttttgactgttcagctccgtgcgcatccgtcacgttggccgcttttgtgattttcgtaatcgagtgaggcgtgtcagctttttcatcacccgtccattctacaatgctgccgtctttgtaatattggtaggcgtcccaagcggcatccccggtcttttcagggtttttcgcaacaaatgtgaactgctggaattggccgggctgaatgccgccgttcttcgcttcccaagtgacggagaccgctttgtcatcatgctttgatacggacgttttccagcccggaatcggctggtactgctgaaattcaacgcccgcaggcattttcagcacgactttcgttgtcggctcatttttttccacaggcactttcatcgtgtacgtttcccaggaacccgccgcggattccgcgggtttgactgagacgtgggcgcttgctgttgccgtaaaaccgatgagtgacagggttatggcagacatgaatactaaagccttttttttcaacatgagatacactccttagtttgtggttgagaatatttgattgatttcattaaagtcgtttgtcagtccgtggactttgatcttccagtttcccttttcggtgatggacatattggcggcttcgaatgtgccttccttcgtttttttcaaatcaaaggtgctttcatgctgtttgccgctgaagcccgtctgataaaccgtcaccgtaaattgctgaatgtctttcacaaggctgccgttgtgatcggtgacaatgacttgaaattcatttttacccggctggttcggcgttatgtgcaaggacagggtttccccgtttccgatcatgtctgagccgttaaaaggcaatggcgcaggcggcggcgggctgggcaggcttgtgaagacggcggttgtaaataacaccgcaatccctattacccattcggcctttattgtgccgctgatgcttttgtttctgcggagttttgtcatccatacgtgaatggcgccgagagcaagcatgatgacaaacagtccgattttcaaaagaagcgtcttgccgtaagcggtgtgaaagagtgaatcaaacgaacggataatgaaaaatccgttcagcacacctgaaaataaaagcacgccgacagaggcgaatgcccaaggggagaaccgtctgaccgtttcccaggcgatggttttatcggtgtttctccactctgatgaaagaagcagcacaagcgcggctataccgcccgtccatacagacgcggctgataaatggagaaagtccattgtgatgccgaccgctttttcgtcaatgaccgccgcatgtccggcaaatgcttttgccaaaagcgaagcgaaaaagaacaatagcggcgccgtccagtacgcaaatgaccgaaatgctttcttcttcaacagcgggatcatggacacagcaagcaggataaataagctgatctggatcatccagacatacccgccggccgttttcagaagcgtttcttttacatagtccggctgaaacgcggcgctccaagcgccgcccgcgttttctttcgtctggatcgggagctggcagacaagcgcgagtcccattaaacataaagagataacgagcagctttacggttcggctgttttttgatgaactttcattttttctgaaccaaaacagatggaaaaaggccgtgccgataaacagggagagagcggtgtacaaaataccgcggtcgatggccgcttcggggtggagggccgcttgcgatgatgttttctcctgaaggtctccgccggctttcccgatactgaaaggaatgacgccggataccgggtgtccgtcagctgacaccgcgttccattccgctctgtaaatatcatgcggcagattttttttcaaagccgcggtcatgatgcgggaatcatttttttgaatcaccgttttgcccgcatcgacccgttcgccggatgaattatagaccttaatggagtggaagccttcttcaatctgttcattaaactcaatttcaatctgctttggcgcttgttttaattcgctgttctcacccggatttgagtttgtgatgtaggcgtgggcgaagcttgttttcggaatcaaaacaaggaacagcaaaaagatgagccagcgtttgttctgtctcatggctggtgacaccgccttccggttggttgttgttatgtcttgctgcaggtgcatcctttctgcctgtcgtgtaagatgatgtccgctgccttgtcaaaagtgcaaatgaccccgccgaagcctttttgaaaccgttccgcgtaatcaagcgttgagaaaggaatcgcctgaggccggcagcaatgaaggtcaatgtcggcatcgactaaaaagtatgcagaagcggccgtcagcgtcgtttggagaaggaaatccttacaaatgacgtgggacacttcttcctttttatcctcataccgcaaaatcgcgcaatgaatgcagcacatctgctcaacgttctgtgaaacggtaataagctgaacggaatatgaatgctgaatcggccgcaggcaatagccgcattgattggcgctttgttctgaagcgggcgggagcgtaatgccgccgggtgtccggataatccggtttgcatccgccagctgattgacgtctctgtacacggtcatctcggagacgccgaatctctcgctgatgtcagagattttcagcgcgccctcttctttcagccattcaagcaatgtttgctgtctgttaatcggaagcaattctgcatcctcctttttatgcgaatgagtgatgaacctccttctaagagtagatgttttcacaaatgtgtacaagagcctgatgataaaatatgtgaaaatatgttgaacaatcacaaatgtaaaacgcggagacagactctgttataatagaagagttgaatggaggaataaacatgaaagaaacgacctgcccgaactgcggcaagccgattacaggcgacatggtcagatcatccataatcccgtgccagtttgattgcgggcactgccatgtgaaattgcgtgaatataaagtatcagctccgattatggctgttgccattgcgataacggtccttttgatttatcttgtgcagatggcccgaaccgctgtcatgccgatgtttccggcggcgcggtatgtgccggccgccattttcgcgctcgtatgcgcatatccggtgttcattgtcagtgagcggctcattgcgaaactcgtcgttacaaaaggacacattatatacagaaagcggtaagacaccttgttatgaggtgtctttttttagttaaggatttgtcacactctatgtgccaaactcctctttacttttcattgaatgaggattgtaagcgttttatgatgaagacacaggggagaaagaaaccccatgtcttatttatttcatcttaaggcgagcatacagggagggaattgacatgcagcaagaacagcaagctggcatgaaagtgaagatacagcggttcggcagttatttaagcggtatgatcatgccgaatatcggcgcatttatcgcgtggggaattatcaccgcgctgtttattcctaagggatggtttccgaatccgcagctgaatacattggtaagcccgatgattacgtatcttctgccgcttttaatcgcatatacgggcggaaaaatgatttacgatcatcgcgggggagtcgtcggggcgacggccgccatcggagtcattgtcggagcagacattccgatgttcttaggcgcaatgattatggggcctttgggcggttatctcattaaacaagtagatcgtttatttaaagataaagtcagacagggttttgaaatgctgatcaacaacttcacggcgggaattatcggcgctgtgctgacaattatcgcgttttatgcgatcggcccggtcgtcctgtctcttaacaaattgctggcggcgggtgtggaagtcattgtccatgcgaatttgctgccgattgcaagcgttttcgttgaaccggcgaaagtcctgttcctcaataacgcgatcaaccacggcattttaagtccgatcggaatcgagcaggccgcaaaagcgggtaaatccattctgttcttagtggaagcgaaccccgggcctggactcggtattttactggcatacatgttctttggaaaaggctcttcaaaatcgacggctccgggagcggcgatcattcatttcttcggggggattcatgaaatctatttcccttacattttgatgaaaccgatgttgatcctcgcggcgatcgcgggaggagcgagcggactgctcacattctcgatttttaacgcgggacttgtcgcggcatcatcgccgggcagcatcatcgccattttagcgctgacgccgaaaggaagctatctcggtgtgctggcgggcgtcatcgttgcagccgccgtatcgtttatcgtatcggcccttattctgaaatcatctaaagcgggtgaagaagatctgacagccgccgcggaaaaaatgcaggaaatgaaaggcagaaaaagcgaagcggccgctgcgttggcagatacagaggaagagcctgaaagcggcgcagccgatatttccgctgaccaagtcagccgcattatcttcgcgtgtgatgcgggtatgggatcgagcgcaatgggcgcgtccattttaagaaacaaagtgaaaaaagcagagctggatattgatgtgacaaatacgtcgatcaataatcttccggatgacgcggatatcgtcattacgcataaggacctgactgaccgcgcgaaagcgaagcggccgcaggcggtgcacatttcggttgataatttcttaaacagtccgaaatacgatgaactgattgaaaagcttaaaaactaatcaaacagaaagagggattttcatcatggaagtattggctaaagcgaacatcaaactgaaccaaacagtgaactcaaaagaggatgccatccgcctggcgggacagacattaattgataacggttacgtgaaaaacggctacgtggaaaaaatgttcgaacgtgaagaaacatcatccacttttatggggaatttcattgcaatcccgcacggcacggaagacgcgaaggaagaagtgcttcattcaggcatttccatcatccagattccgaatggtgttgaatacggtgaaggcaatacggcaaaggtcgttttcggcatcgccggaaaaaacaatgagcacttagacattttgtcaaacatcgccatcatctgctcagaggaagaaaacatcgaacggctgatcagtgcaaaaacggaagaagaactggccgctattttcagcgaggtgaactgacatgattgcccttcatttcggagcgggaaacatcgggcggggctttatcggcgccctgctccatcattccggctatgatgttgttttcgctgatgtgaatgaaacgatggtcggccttcttaatgaaaagaaggaatataccgtggagcttgccgacggcggccggcagacagaaaccatcggccccgtttcagccatcaacagcgcgaagcaagaacaagagctgtacaggctgatcaatgacgcggcgatcattacgacggcagtaggaccgaatgttctcaaattcatcgccccgtcaattgcggaagggctgaagcgcagaacgtcctctgagcctctgaatatcatcgcctgtgaaaatatgatcggcggcagcagttttttgaaaaaagaggttttcggacatttgacggaagcggagcgggaactggtgaatcagaaggtcggcttcccggattccgcggtggatcggatcgtgccgattcagcaccatgaggacccgctgaaagtatccgtagagccgttttttgaatgggtcatagacagaaccggctttgccggcggtcagccggcactgaaaggcgcattgtttacggatgatcttacgccgtttattgaacggaagctgtttaccgtcaataccggccatgccgttacggcttacgtcggctatcagcgcggattaaaaaccgtcaaagaagccatcgaccatcctgaaatccggcgtgtcgtgtacgatgccctttcagaaacgggcgagtacctggtaaaagcgtacggctttaagcaagccgaacacgagcagtacatgaagaaaatcatcagccgttttgaaaatgaatacatcacggatgatgtgacgagggtcgccagatcaccgctcagaaaactcggagcgaatgatagattagtagggccggccaaaaaaataaaagaaccgaacgcgctggcagaaggcatcgccgccgccctgcgctttgactataaggatgatccggaagcggttgagctgcaaaagcttatcgcggaaaaaggcacgagcgcggttcttcaagacatttgcggtattcagccgcatgaaccgctgcacggcatcgtacttaaaaagctgaatcaataagatgaatccgcgtcgggggacgcgggtttttttcttctgttataatgtgagggaagggaggctgcgtgatgaatgaggagcttttgccccatcgttatccgtttcttttattgacggcatgaagaacagcgaagccggaaaatgggcggctgcttataaatacatcagtgaaaatgactggtttatgtcagaatcacagagagagatgccgttttcgctcatcgttgaagcaatggcccaaacggccgcctgcgcggggattacaggtgaaaacagtctcggcctgctgtctgcggtgaagaaagcggaaagattaggtgccgctttgccgggagaccgtctggatcttttgtttgaagtcacgcgaatcaggcgcgggtttgtattcggccgggcgaaagcgtccgttgccgggaagcctgtcgcggaagctgagatcagcatatttatccagccatcgtaaaaaaagccgccttcagcggcggctttcggacaagcctgtcattttgtatcataatctctttcactttgtgaattgttcctttggtcgtgtttgtgtttttcgtcattggcgttttccttcagctcttccagcggaatcggatcggttaaatcatgatgttcaggattttcattcggtttgttcttctgttttctttctttcatccttcatcacctcaatagttcttttcctcaacgttctccccgccaaacgtcagggagcggttttttgttcctgtgggtcatatgtattaaaatagaaacgactacattataaaaagtgaggtacatatatgccgatacaaagagaagacgcagatattaaactgatcgcgattgatatggacggaaccctgctcaatgacgagcagctcatcccggaggaaaaccggcgggcgatcaaggaagcggaggcgaaaggaattcacgtcgtcatcagcaccggacgcacgctgatgacctgccgcgagctggctgagtctctcgagctgtcatcctttttaattacggcaaacggcagcgaaatctgggattccaactttgagctggttgagcgcaagcttctgcataccgatcatattcaaaaattatgggatctgagaaataagcacaacacgaatttctgggcctctaccgtcgatagagtatggagaggggaattcccggaaacgattacggatcaccagtggctcaagttcggatttgaaatcgaggatgacgatgtgcggaatgaggtgctgaaagagctgaaggaaaacaaggagctcgaaatcacaaactccagcccgatcaatatcgaagtcaatgcgctcggcattaataaagcggcagcgcttgcgaaggtttcggaaaaactcggcttcacgatggaaaatgtgatggcaatgggcgacagtctgaatgacattgccatgattgaaaaggcgggcgtcggcgtcgccatgggaaatgcgcaggacatcgtgaaagaaacggctgactgggtgactgatgtcaacacggaaaacggggtcgccaaagcgatccgccactgggtgctgtaatagaaaaaagagggtctctgtatgaggctctcttttttgttttgtcacatttctgactaggtccatggtaggttttctgacaaaaggatgttcaaatctgtcagaattgatataatgaaaaaagtccaataattcggaatagtcgttccgaatagcggaatgataataaaataaaacgtttacaatacaggagggatcttatgtttcagattgacatcaattgtgatttaggagaaagtttcggtgcttataagatcgggcttgatgaagagattttggattatgtgacatctgcaaacatcgcctgcggctttcatgcgggtgatcccaccgtgatgcgcaaaacagttgcgcttgcggcggagaaaggcgtgaaaatcggcgctcatcccgggctgttcgatcttcagggattcgggcggaggcagatcgcgattacgcccgaggaagcgtatgatctgacactgtaccaaatcggcgcgctgtcaggatttttaaaagcagaaggtgtcgcgatgcagcatgtgaagccgcacggcgctttatataatatggccgccgtcaaccgcggtctgtcagatgcgatcgctcaagcggtttttcattttgatcccggacttattttattcggactttccggaagcgagctgattaaagcgggggaccgaatcggactgcagacggcaagtgaagtgtttgcggaccgcacctatcagaaagacggcacgctgacgccgcgttcacagccggatgcgctgattcaggatgacaaaaaagcggtcgggcaagtgatccgaatggtgaaagacaatacggtgacatctgcggagggacaagctgtaaacctgaaagcggacaccgtctgtattcacggagacggcgcccatgcgctcacattcgcaaaaacgatcagaaaagaactaaaagcggctgacattcaaatcagcgcgcttgcaaaagactgagcagcagagggaggaagacagcatggaacaaaagaaaaaaacagccggaaaggctcccggcagatggtcgctgcttttaggcgcgacatttctgatggcgacatcttcaatcgggcccggctttctgacgcaaacggccacgttcaccaatacattggcggcaagcttcggctttatcattttaatctccattattttggacattttcgcacagaccaatgtgtggcggattatcgcagtttccggaaagcgcggccaagagattgcaaatatggtgctcccgggcgccggttatgccattgcttttctggtcgtgctcggcggacttgcgtttaatatcggaaacattggcggcgcgggtctcggccttcaagtattattcgggatcaaaccggaaatcggcgctttaatcagcgctgcggtcgcggttctgattttcgtcataaaggaagccggaaaagtcatggaccgttttatgcaaatcgccggaatcgtcatgatcatattaacggtgtatgttgccgtaacgacggccccgccggtcggacacgccgttgcgaaaacctttatgcctgatcatatcagtgtgctggcgatcgtgacccttgtcggcggcacggtcggcggatacattacatttgccggcggccaccgtttacttgattcaggcatccaagggaaggaagtcattcctcaggtcacgaaaagctccatcacaggtgtcttaattacatctattatgcggattgccctgtttctcgccgtgctcggcgtcgtctcaaagggcctgcgtattgatcccgataatcccgcggcttctgtattccggcttgcagcgggaaatgtcggctataaaattttcggcgtcatcatgtggtctgccgctattacgtccgtcatcggcgcggcatatacatcggtgtcattcttcaaatcgttctcggcaaaaatcgaaaagcattcacacggcgtcattatcggttttatcatcgtatccacgctcatttttgtcacgatcggccagcctgccaaaattctggtcgcggtcggttcgcttaacggtttaattctgccgcttgcgttagcgatgattctgttgggcgcttataagaaaaaaatcgtcggcgattacaagcatccagtctggctcactattgcgggggcgacagtagtcgttgtcatggcgattatgggcatctatacattattctcgcaattgccgcagctatggagctgatgacatgaaaaaacatatgagtgacatgactcccgaagaagtcagacagcttatcaggaaggggcagatgaccgggccgacggcaggatgggccgcttcttatgcacaagccaatctcgtcgttttgcaaaaggatcttgcctttgattttctcttattctgccagcgcaatcaaaagccgtgtccggtgcttgacgtgacggatacgggctcacccgtaccggctgttgcggcgccgggagctgatatccggacggactttccgaagtacaggatttatcggcatggcgtgcttactgaagaggtaacggatatcacccggtattggaaggatgattttgtcgggtttttgatcggctgcagcttttcattcgagcaagcccttatcaatcagcaaattcccatcaggcacatcgatgagggagtgaatgttcccatgtatataacaaacattgactgtgttccggccgggcggttttcaggaaagatggtcgtcagcatgaggccgattccggaaaggcttgcagtccgcgcggcgcaggtcacgtcacgttttcccgccgtacacggcgcccccgtcagcatcggaaatccgaaaagcatcggcatcagcgatttgaatcagccggacttcggcgatgccgtgacggtgcgggaaggcgaagttcccgtattctgggcgtgcggcgttacaccgcaggcggtgatcatggaagcaaagcctgagatcgtgatgacgcattcaccggggcacatgctgatcaccgatatccggaatgaatcgcttgctgttctgtaagtgagaaagaaaacaacgaggtgatgacaatgatgcagtatagcggcaatacagcgcttgatatacagccgcacggtgattccgccgttatcatccgctttggcgggcaaatcagcgaagaggttaacagccgggttcatgcggcggcggcctgtattgaagaacggccgtttccgggcttcgttgaatgtatcccggcatttacgagcttaacgatcttttatgatgtgtatgccgtctcaaatataaaaaaaggcgtctctccttttgcattggccaagaaagaagtgatagaacgcctcagccatttaaagaccgacaggcaaaaagagcgccgggtaatggaaatccccgtttgctacggcggtgatttcggtcctgatttagaagaggtcgctaagatgaacgatctgacgccggaagacgtcatccgcattcataccgaaggcgaatatctcgtctatatgctcggattcgcgccgggatttccgtttttaggaggaatgtctgagcggatcagagcgccgagaaagtcgtcgccaaggccgtcaatcccggccggttcagtaggaatcgccggaatgcagaccggtgtgtatccgatatccactcccggcggctggcagctgatcggcagcaccccgcttcggcttttcaggccggaagaacatccgccaagcctgttgagagcgggcgatacggtgaaattcgtccgaatcacagcagaagaatacagccgcatcaaggagggagccgaatgagcatgaaagtggtgaagcccggtcttctgacgacgattcaggatacggggcgaacggggtaccagaaatacggtgtactgggaagcggcgcaatggatacgatctctctgcgcattgccaatcttcttgccggaaataaagaaacagaagcaggactggaaattacgctaatggggcccggtccttcctttgagctttcagaaccggcagtcattgccgtcacgggggctgatttcgcctttcatattaatggagaaccggcccctctgtggaaaccggttcttgtaaaggaaaacagcgttgtttcatttggaccgtgcaagatggggagccgcgcttatctcgccgtcgcggggggatttgacgtgcccgccgtcatggaaagcaaaagcacgtatgtcagagcggggatcggcggcttttacggaagagccctgcaaaaggatgatgaacttccgctcggcagtatgacgcagtgctcggaaatcatcgcgcaccgtttgagcgattctctcgggcagcatggtttctcagcgcctgattggtctgtcagcagcagaggttttctgccgctgaaaaaaaatccggtcattcgtatgcttgaaggggcgcaatttcatgcttttacagaagaagcaaaatcacgtttttacaaagagccgtttacggtcacgccgcagtccgaccgaatgggctaccggctgaagggcgctccgcttgaattacaggagccgcttgaaatggtatctgaggccgtgacattcgggacggtgcaggtgccgccggacggcaatccgattattctgctggctgacaggcagacgacgggaggctacccgcgaatggcgcatattatatccgccgatcttcctcttgccgcccaaacgatgccgggcgaacatatcacgttctcggccgtttcgctggaggaagcggaaatgctgcttttggagagggaacagcagataaaggagctgaaagccaggctcaaaatggaatggctgatctgacaaaggggctaaagaccatggaaaacaaaaacaaaaccgtcatcaaatcaatggagctgcttcatttgtttctgactgaaccaagcctgagcctaaatgagcttgtttctcgatcggagatgccgaagacctcggttcaccggatggcaagttcactggaggaaatgggatttctcacccgggcagcggacggccgttatcagctgggtctgatctttttgcaattcggccagcttgtctctgagcgtctggacatcaggaaaatagccaagccgataatggaagagctgtgcggtgaagtggatgaagccgttcagctgattatgagggacggcgatgaagccatttacgttgaaaaaattgaaggcacccaaaccgtccggctgtttaccgcaatcggccgccgctcgccgctgtacgcgggggcgtgcgccagaagcattttatcgtttctgccgagagaggagattgacacataccttcagaagacagagtttgccgcaattgcctcaggcacgatgacgaatccggctgaactgcttcaatctattgaaacgtcattacaatcagggtatacgatcagctattcggaattagaggattacacggcggcgattggggcgcctattttcaaccacgaaggaaaggtggcggcgggaatcagcatcgccggctttgaagccaggttttcagaggatcggctgccgtatttaacggaaaaggtcaaagccgcggcacagcatatttctgagaaattggggtattgaccgagccaattttccttcgctcgcgtacattacaatatcgacagtaatgagtggaggaaagtaaatgggacttgtttatacggcgctaggggattctttgacgacgggaaggggatccgggccgttttcccccggctttgttcagcggttcgggtgtatgatggcagaagatttacagacaaggaccgaggtatccatctttgccaagtcaggccttgagacgggagaaattctcgggcttatgtccttgccgtacattcagaggcggattcaggctgctgatatgattacgattacgggctgcggcaacgatttgatcgattcggttcgggcgtatcagcaaacgaaagacgcttcggtgttcgccggcgtgtcccgtcactgccatgagaactttgaaaagatgattgccaagatcgctgccttaaaagaaacgcacccctctccttatgagatccgcgttttcaatttatacaatccttttccgggcatctccattgcggaaaaatggatatcttcttataatgcgcacctcagcacactcgcatcagcgccgcacgtcaaaattgccgatgtccacagcgctttcaaaggaaagctgaacgaatatctctctcatgaccgcgtacatcccaacagcagaggatatgaagtcatggcatgcgtcctgcgggggctcggatacggaagcctcgcccgctcataaccgcgcgctccttttcatcgggagcgcgcttttcgttctccttaaaacaaacttaaaattgtccgactttcgttctatccgtgcaaaaagtacgctagaataatgggggataaagacagaaatagaattgtgttcaaaaaatgataacagaaaggatggattgctttgctgcgcgccttaaaactgtcactcgcgatgctgattattatacttgcggccgccgcatttacgtatgcggaacatacctctgtcatacagccggttatgctcgtgtttctcggtgcggtcatgttcattcagggactggaagaaaagcggaaggaaaacgacggttcggggagattcaatatctataccgctgtttttgtatggtcgatctccttaatcggttttacgcttcacgcgatctgagtttgatagatcctcaaaatgttccacaacgggaaatggtgaataaaaacggtgaagtaaggctttccattcctgatattccggtgatccgcgaaagccttttgtatgatcctccaatgtctcccattccacaagcagcaaatatttatgcgtcttttccatacatttggacaaggaatgggacagataacctttcatgcccgatataatcggctccgcccggcggaatgcctcttcgaattccccttcaaagccttcttttacatgcagcatggctgcttctctgatcatctgaaattcccccttttttaatagatacattgtataagtatatggaccgtgatggctggaaaaacaaaaaaattttaaacgctataagaaaaaaatccttgccagcctgatttgatttaggagaaaataacaattggaaggcaggggaattaacagtgaaaaaaggattatacctattacttttactcgcaggaatcctaggtttgatcggctgttcgaaaacggagtcggccgaagacagaatgaaagatttcgtgaaagactggaacggcggtcattacgataagatgtaccaaagcctcacacaggatgaaaagaaaaaattgtccaaaaaggattttgtaaaacgatatgaaaccatctatgaacaagcaggggtcaaaaatctgaaagtcactgccgaaaaacaggacgaagacgataagaaaaaagatgaccttcagcacatcgattataaagtcagcatggatacaaaagcagggaaggtcgcctttgaaaacacggccgtcctgaaaaaagaaaaaacagacgatggagaagcatggaacatcgactggaatccttcttttattttcaaacagctttccgacgacaaaaccgtgcagatcgcaaatgaagaaccgaagcgcgggcaaatctacgacaaagacggcaaaggcctcgctgtgaatacggaggtgccggaaatcggcattattccgggaaaactcggcaaggataaagacagcgtaatcaaaaaactgtctgaaaaactggacctttctgaagacgatataaaaagcaagctgaatcagggctgggtaaaagacgactcctatgtcccggttcaaaaaatcagaccggatgacgaaagcaaggtcaagagcctgctttcattagacggcgtgacgaaaacgacagtcagctcccgctactatccgtacggcgaaaaagcggcccacctgaccgggtatattaaaacgatcacagcggaggatctgaaaaaagcaaaagacggccaatacagcgacacctccaaaatcggcatcgccggccttgagaatgtatatgaagacaagctgcgcggcacgaccggctggaaaatttacgttccgcaaacgggtgaggtcatcgctgaaaagaaagccaaaaacgggcaggatattcatgtaacgattgacatgaaaacgcagacgaagctgtatgattccatgaaagatgacagcggagcggcagtcgccctcgaaccgcaaacgggagagaccctcgcgcttgtcagcgctccgtcttatgacccgaacggctttatcttcggctggaacagcaaagaatggaaaaagctgaatgaagataaaaacaatccgttttcagcgaaattcaacaaactctatgcgccgggatcaacgattaaaccgattgccgcggcagtcggcctgacaaacggaacgttgaaagcatcagaaaagaaaaaaatcaccggaaaagagtggcagaaagattcaagctggggcggctaccatgtcacacgcgtatcagagcgtctgaatgaagtggatctcgaaaacgcgctgattacctcggacaacatctactttgcgcaaaatgccatagatgccggagctgacgcgtttacaaaaggattaaaatcatttggttttgatgaagacattccataccaatttccgattgaaaaatcgtcaatcgctaacggcaagcttgattccgagattcttctcggagatacgggctacggccaggggcagatgctgatgtctccgctgcatttagcggctgactataccgcatttgtaacagacggaaatctcgtcaaaccgacattaatcaaagacggagaaaaaacaccgcaaatctggcataagcaagtggtatccaaagccaatgccgaagaaatcacaaaagggctgagaggcgtcgttgaagatccgcgcggctctgcatatcagccggtcgtaagcggcattaacgtagccggaaaaaccggtacagccgagctgaaaacgtctaaagaagataaagacggcaaagaaaacggctggtttgtcggctacgactataaaaagaaagacctcttgatcgccatgatgattcaagacgtcaaaaaacgcggcggaagccattacgtcgttgaaaaagcgaaacagcagtttcagaaccggtaaatgacgatttttccgggctgaaaggaaaatcggccgccgaagcagaatgaaacagcatgggcaattcctgaaacagagatacaagaggctcactaagaaaaagggggatttcacatgcagcgtattcaattggctgaagatctggaattttcaagagtgatacacgggctttggcgtctgaacgaatggaattattcggacggggagctgctgaatctgattgaatggtgtatcagccaaggcatcaccaccttcgaccatgccgatatatacggcagttatacgtgtgaaaagctgttcggcggcgctttatccctttcgccctcaataagggagcgaatcgaaatcgtcacaaaatgcgggattgtcattgagtcgccggaacggcccggaaacaagtcgcatcattataatacgtcgaagtctcatatcttagcgtcggcggagcagtcgctcttgaatctgaatacggattatctggatgtgctgctcattcacaggcaggacccgcttatggacccggaggctgtagctgaagcgtttcatgcgctgaaaagctcaggcaaggtcagatacttcggggtatcgaactttaaagcgcatcagtacagaatgctcgaatcctatttggatgaaccgctcatcacgaaccaaattgaaatctcggcttatgagctggaacattttcatgacggcacgctggatttctgtcaggaaaaacgcattccgccgatggcgtggtcaccgcttgcgggcgggagcgtctttaccggacaatcggataaggacgtccgaatccgtaccgcgcttatttcggtgcaggaagaaatcggcgccgcctccattgatgaagtcatgtacgcatggctgttcacccacccggcagacatcatgccgattgtcggcagcggaaaacagaaccgcatttccgcggcggtgcgtgcttcagcgtacaagctcagccatgatcagtggtttcggatctatacagctgtccaaggttatgatattccataaccaaaacaaacgcccggaaggctatcttcccgggcgtttgtttatgtggtgtgcaatgtcaaaaaacaagtaaggtcactttgaagtatagccgtgcggatcaagagaaacaaacgtcacggcatattatctgacacatttttcttattcaatactgtcacacggaccagtgccaaattgccatttgaaaatggttgtatattctttgaaagcgttttatattagaagttacactactttccccggcagcaccccccatgtgccatacctctcacaactagaaaatctggaggcgcgtttcatgtatatgacagcgagagaacaaaaattaatgaaacatcttttactgcagaaccgatacgagacagtgcatgaactggcagaagctttacaagtcagcacaagaaccgttcaccgcgagttaaaaacaatcaaaccgatgatgaaatcattcggcttggcacttgataaacagcccggcaaaggactgaaagcggtgggaaaaccggaagataaacagaagctcctgtcagagctgtcctatgaacagcaggaatacagcgcggaggagcggaaacttttaatcctatgttcgctattagagtcccaagagccgatcaagctctacagtctggcgaacgagctccaagtgacaaacgcgacgatcagttatgatctcgatgagctggagacttggattgctcccttcggcttgacgctgatccgaaaaaggggcttcggcattcagctgacgggaccggaaaatgcgaaacggaaaatcgtcggcaatctcatggtcaaccgccttgatattcaaacctttttggaagcggttgaattcaatattaaagggaaacccgacgctgctgaaaagatgttcggcgttgtaaataaagcggaacttttgaaaatggaccggctcttgattcagctcaaggaaaaaatcgcgatcgctttatctgacagctcttacatggcgctggcggttcatttaacctttgcgatggaccggatcagactcggagaaaccatcacgatggaagcttcggaactaaaagcgctgcagcagacgaaggaatacggctccgcgctcgaaatggcaaaagagcttgaaaaagcgttcggtgtttcgattcctgaggcggagatcggctatatcaccattcatttgcggagcgccaaccgcaaatacaaaaccgaattcaaaccggaaaacattgaagttgaaacggccttgcaaacgaagcagctgatcggcttcatttctgaaaaaataaaaattgatctgacggaaaacggctctttatatgacggtttaatcgcccatctggagcctgcgatcaatcgggtgaaagaaagtatcgacatgtacaacccgatgactgagcaaattaaacgcgactacttcctgctgtatatggccgtagaagaaggaatggaaaaattctttccggggcttcgttttcctgatgatgagatcgctttcatcgttcttcacttcggctccgctctggaaatcaaacgggaagaggcgaagatcaaagcgctgatcgtctgttcaagcggcatcgggtcgtccaaaatgctcgcgtccagactgaaaaaagagctcccggaaatccgttcctttgatatgtcttccctcatcgaactgaagaaccgtgacacctcggcgtacgatatgatcgtatccaccgtgccgatcccgtatgaaaacattgattacgtcatggtcagtccgcttttaaatgaagaagacgccgatcaggtcaagcagtacatcaaaagaaagattccgctgattcttgacaaaaaaagaaacagcaaaagagaagagaagcagcctgagacgcctgatatgctggaagcagccggacgtatggcgcattacgcggcggttatccaaagcgtgctgcggaacttttcgatcaaatccattgattcacacatggcgtatgagttgtttttgaaccatctctttggcgtgcttgagcaagaaggatttgtccgtcatgcaaaaaaaaccgcacagctcctcacagaacgtgaagaacagggagggctcgggattccgggaacggcgatggcgctttaccatctcaaaaatgaagaaattgtcacgccttttttcaaaatttatgatttgacagctccatgcagtgtcaaaggcatggacggaaattccctgaccgtcgaccgcgctttggtgatgatggcgccggctgatatgcccgctgaaggctcggaaatattaagtgcggtcagttcggccattattgaatccgaagccagtataaaagcctttcagacagaggatgaagccgatttatacaaacgtttaaacaggctgttttatcatttcattcaggagaaaggacagcgctgaacaggaagcgcacgcctcataaggcgtgtgtttttttccgtatgtatgagggtaaagtgaagggaggaaactaaaaacacgggactattgtatcattcaccgatggaatagttctaaaacaaaatagttttacaagttatattttttggtttaaaatgggttgcgtgaggaagaaaatctgacagagtttttttgatttatcattatgggagatgaaaatatgaagacattacagcatctgattctgcatgacatttcaaatagcgaagagatcgaagctgtaaaaagcggtgcgcacaccctgacctacgcggaatatcgaaaacgaatcaatcagcttgcacaagcgcttcttgataaaggaataaaaaaaggcgacagagtggcgatgctttgcaaaaacggccacgcttcatccatcgttatgtttgctgcacttgaaatcggcgcggtggttgtgccggtcagctggcaattaacaccgtatgaaatgaaaggcattttggcagcctgtgagccgaaagctgttttttacggcactgaatttaaagagattatggaagaggtgcttcctgcgcttgaatcttcccttaaactgaaggtcgtgacaggaactgctgtagagacaacacctgagtttgatgctttattgacaggctccggcgatacaccggacgtcgaaacagtgtctgaaaacgatacggcattgctgatgtttacctcgggtacgaccggcaatccgaaacgctgcatggtcactcacggcggcatatacaactacgtaaatgcgacattggcatacacggggagaatgcagcatgtccgtttcttagcatgccacccgaattaccatacgagcgcgattatttgccagatggtcggcacgatgagcggaacgacattcgttatgacagacaatcaggaccctcttgaaaacttgaagctcatcgaaaaagagaaaattcaaaccgtgatggcgctgcctgtttattacacatacctgctgaaagcatgggaaacgcatcagactgacatatcttctatcgtttatatgatgacgggaggcacaaaggtgccaagcagcctgatccagcagtatcaggacatcggcattccgctcatgcacggatacggaagcactgaagcatggggcatcagctcttggaatccgcaaatgggaatggataaagccgcttctgcgggtaaaccgatggaagaagtggacgtccgcgttgtagatccggaaacaggagaagtccttccgcaaggctcaatcggagaagtcgttgtgacaagtccgtttttattcaaaggctatgaaggtaacgaagaagcgacacgaaaagtgctgaaagacggctggttccataccggtgattccggatatgttgatgaagacggatttatctttatcaccggacgttataaagatgtcatcatctacggcggcgataatatttatcctgaccagattgaagaggtcattcagcaagtgccgggaattctcgaaacggctgttgtcggtatccctgatccgctttacggtgaaaaaccgaaagcgtttatcgtgacaaacggcagagaaggcctgacagaagaagaagtgacacgattccttcaagaacgtcttgctgcctttaaaattccggaaattgagttcgtcagcgaacttccgaaaaacaaccttggaaaagtgaaaaaagacgtgctccgcaaacaagcggtccgttcataattgaaaacaaaaacccggctgcccgccgggtttttttcgtgcgttccatgtgaaacatttttctccgaaaacgttttgaactgtttcaattatgtttatccggcagacagccgaggtagacatgaagtaagacatcgaacaagaaggaggaacttgacatggaaaacaactatccgaaggaattcccggcggaatcacaaaaccgccagccggcattgagagcgaaatgaagccggcgcctgtttacgaatacaaagaatataaaggcgctgataaattaaaagggaaaaccgcgcttatcacaggcggtgacagcggtatcggccgcgccgtagcggttgcttacgcaaaggaaggcgcaaatgtcgcaatcgtctattttgatgaacacggagatgcggaagatacaaaaaaacgtgtggaggaagaaggcgtaaaatgcctgttaatctccggcgatgtcggtgaggaagacttttgtaacgaagcggttgaaaaaacggttgaagaattcggtcgtctcgatattctcgtgaataacgccgcggaacagcatcctaaagaaagcattaaagacataacaagcgagcagtttcacagaacctttaaaaccaacttttactcacaattttatttgactaaaaaagcgattgattacatgaagctgggcagcgcaatcatcaatacgacatccattaatccgtacagaggaaatccgcagctgatcgactatacggcaacgaaaggcgcgattaacggttttacgagatcaatggcgcaagcgctcgtcaaagacggtatccgcgtcaacgccgtagcgccggggccgatctggacaccgctgattccggcgacattctcaggagaaacagtcgcttccttcggccaggatacgccgatgggacgggccggccagcctgttgagcatgtcggctgttatgtgctcttggcttcagatgaatcatcctatatgaccggccagacgctgcatgtcaacggcggcggatttgtgaccacataagggggctgaagcatgacgatatcgaagcatgatgtgaatgcatactatcaaaaagcgggaatcgttctgaccgatgatgaagtcgaagacattcaaatcatggattatggcttaggcaagcttcaggaaacagggcttcagctgtttatttacgtgaatacagaccgttactgttcgaaagaattggtgctctttccgcgccagacgtgtcccgaacaccgccatccgccggtcagcggcgaaaagggaaaacaagagacattccgctgccgctgggggaaggtgtatctctacgtggaaggcgaaaagacagaacacccaagcgtcctcccgccggaagaagataaggaatactacactgtctggcatgagattgtgcttgaaccgggcggacaatacaccattcccccggatacgaaacattggtttcaagcgggagaagaaggggcggtcattacggaaatgtcatcgaccagtacggatgatcacgacattttcaccgacccgcgcatttaaggatgaggctgcgcgcctcatctttttttgtatggaaaaaaatgaatttacctgtataatggctaataaaggaaaggaggtgtgatcgtgttttcctgtcaaatccgggaacatctgacgatcagattgcttgccaaagaagatacggacgaattgtattctgttataaaacgaaatcaaaaccatctcagcgaatggctcagctgggcggaagaactggctgatatcgatacgtaccgcgatgtgatcattccggaatggcgttataaatacgccgaagagaatggtttcgacgccggcatttttgtgaagggccggttttgcggcatgatcagtatccataatgtcgatgcagccaatcaaaaagcggacatcggctactggctggatcaagagcatgaagggttcggcatcatcaccgcgagctgccgggcagtcatttcccatgcatttcaggatctcgggctgaaccgaatcatgatcagcgccgctgaaaaaaacacgaaaagcagggcggtggcggaacggctcggatttcaaaaagaaggactgacgagagaaggcattttcgtacagggcgcctatcatgacgcggtgaactacagcatgctgaagcgtgaatggagcgaagatcggcagaagagcacatttcttggtttaaatgtctccccgatgtggaaaagtaacagcggagacgttaaaaaggagtgattcttcatgaatcagaatgaaatcaaacaaaaagtgctcgaagtgctggatcatcataaagtcggttcgcttgcgactgtagagcaaggcaatccgcattcccgctatatgacatttttccatgacggcttaacgatttacacgccgacaagcaaagacactcataaagcggaagaaattgaaaacaatccgaatgttcatattttgttggggtatgactgtgaaggattcggtgacgcttatgtggaagtagccggaaccgcaaaggtcaacaactcagccgatttaaaagaaaagctgtgggatccgaaactggaacgctggttcgacggtaaagacgatccgaatctggtgattcttgaaattgaaccgaagcagatcaagctcatgaacgcgggcgaaaaaacgccggccgagctggaactttaataaatcatttgatcattcaggggcaatctgttatacttaactgctaagtgacaacatgcaaataaaaaagaaagtaaacttcttttttctgttttgataaagaagcttcaggcttcaacggacagcttgaaaaaaagctgagcttattcttttccttctgaaattcgcccctaacgaagagatggaaaaaagactttttgttttacaattcacaccggcgcggcttcggagccgcagtgacgattgagaggtagggctttcgttgtcttgtgttcaagaacttccatggtgtttactttcgaagaatgattctgtcggaactgtaatgtacgaatcacccgcgggctaaggcgggaaaccatatattatttatttgcgtaagaaaagaataagacaaaaccgcaccggacatccgggcggtttttttatttggccggccgaaacctcgccgcagtctgcagagtctaatcagtatgaaaagatttggaggaatcatacattgcacgttattacttcacaagtactgtttatcttctgttttctgctgttgatacattcgattgaaacacttgcatatgcgacacggctttccggcgcgagagtcggatttatcgcgtccgcgctgtcattatttaatgtcatggtcattgtgtcccgcatgtcaaacatggtccagcagccgtttaccggacatctgattgacgccgccggatcaaatgccctgtctgttgtgagcgcccagtttcgctttttaatattcggctccacggtcggaacgatgctcggcatctgcctcctgccgacatttgttgcgttatttacccgggcgattatacatttggcggacggaggcggctccgtcatgcaggtatttaaaaaaggattttcactgaacgggctgaagcaggcgcgttcttatatcagattgccgtcagtttcctatttaaaagggcttcaattccgaatgatcccgaagcgcttgtttgtcattaatatggttattacgtctatttacacgatcggcgtactgtccgctctgtacgccggccttctggcgcctgagcacagcacgacggccgtgatggcatcaggattaatcaacggggttgcgaccatgcttctggctgtgtttgttgacccgaaagtatccgtactggcagatgatgtcgcgaagggcaagcgaagctatgtttccttaaaatggacatcattgacgatggtgacgtcaagggtcgctggcacgcttctcgcccagctcgttttcattcccggcgcgtattatatcgcctgggtgacgaactggctgtaggtcatgcaaaaaaagctcctctataaaagaggagctttttttatttataatttctcaggccgcggtcataaataaaattgccgaacgggataaaagccgcgataaaaccggcggctgaccatttcacatgccatttgacagtgaacgccgcatacgccagcactgccaaataaataataaacaacccgccgtgaatggatccggcaatggtgacggcgagcggatgatgtgcccaatacttcagcggcatcgcgataaacagcagcaccaaaagcgacatcccttcaataaaccccatcgtgcgaagcctgccgatcggcgtgtgtaacatacaactccctcctgtcggacatctgattttctatactataagcaatgggcagtcctaatatgaccatttcgcgactgtttctgaaaaaccttcatgatttcagcctgttgttcttgtcattttacggatttctcttgataatatagccaaaagggtaaggaaggactacagtcatgaaactagataatgttgatctgagcatcattaaagagctgcagcgggacagccgcctgtccatgcgggagcttggaagaaaaatcaaattgtcagccccgtccgtcacagagcgtgtcaggcagcttgaatccttcggcgtcattaagcgctatacattggacattgatcaaaaaaagatcgggcttcccgtttcctgcattgttgaagcgacggtgaaaaacggaaaatacgatcaattcaaaacctacattcaatccattcccaacattgaattttgttttcgggtcgccggcgcggcgtgttatatgctgaagattaacgcggacagcctggaaacgatcgaacacttcattaaccgcacctctccgtatgcccaaaccgtgacccacgtcattttctcagaaattgacacaaaaaacgtcctcgattagagagagcgtgaggaagtctgttataataacaggatgagtgtgaaagaaagagaagtgaaaaagcatgtcaaaaacagttgtattagctgaaaaaccttcagtcggccgggacttggcccgcgttctgaagtgtcataaaaaaggaaacggataccttgaaggcgaccgctacatcgtcacgtgggcgctcggacatctggtaacgctcgctgatcctgaaggatacggcaaagagtatcaatcatggcggcttgaggacctgccgattattccggaacctttgaagctcgtcgtcattaaaaaaacaggaaaacagttcaatgcggtcaaagcccagcttatccgaaaagacgtcagcgagatcgtaatcgctacagacgcaggacgggaaggggagcttgtggcccgctggattatcgagaaggcaaacgtccgcaaaccgattaaacggctgtggatttcctctgtgacagataaagcgattaaagaaggattccaaaagctccgcagcggcaaagaatacgaaaacctgtatcattccgccgtcgccagagcggaagcggattggatcgtcggcatcaacgcgacccgcgcgctgacgacaaaatttaacgcgcagctgtcatgcggacgcgtccagactccgacattggcgatgatcgccaagcgcgaagcggatattcaggcgttcacaccggttccttattacggtctccgcgcggcggctgatcagatgacgctgacatggcaggataaaaaaacaaagcagacaagaacgttcgaccagacggtgaccggccgtttggcaaaagacctgcaaggaaagccggcagtcatttcagaattgaaaaaaacagcgaagaaaagcttcgcccccggtctttacgacttgacggaattgcagcgggacgctcataagcgcttcggtttttccgcaaaagagacgctgtcggtgcttcaaaagctgtatgaacagcataagcttgtcacgtacccgcggacggattccagattcctttccgcagacatcgtgccgaccttaaaagaccgattaaacggcatggaagtcaagccgtacgcacaatacgtcaatcaaatactgaagcgcggcgtcaaagcgcataaaggattcgtcaatgatgccaaggtatctgatcaccatgccatcattccgacagaggagccgctgattctttcaagcctcagcgacaaagaacgcaagctgtatgatctgatcgccaaacgttttctcgccgtgttaatgccggcgttcgaatacgaagaaacaaaggtcacagccgatatcggcggcgaaacatttaccgcaaaagggaaaaccgttcaatcgccgggctggaaagccgtgtatgatatgtacgaggatgacgacgatcatgaggaagacaaagaccagacgctgccggctcttcagcagggtcagcgcctctctgtctcatcattgaaagaaacgagcggacagacgaaaccgccggcgcgctttaatgaaggcacgctgttatccgcgatggagaacccaagcgcctttatgcagggagaagagaagaaccttgtgaaaacgcttggcgaaaccgggggactcggaacggtcgccacccgcgctgatatcattgaaaaactgttcaacagctttttgatcgagaaaaaggaaaaagacattttcatcacgtcaaaagggaagcagctcttacagctcgtcccggaagatttgaaatcaccggcgttaaccgccgagtgggagcaaaagctctcctccatcgccgctgggaaactgaaatccgccgtgtttattaaagacatgaaatcatatgcgggcaaaacggtgaaggaaatcaaaaacagcagccaaaccttcagacatgataacatttcaggcaccgcctgccctgattgcggcaaaatgatgcttaaagtcaacggcaaacgcggcacgatgctcgtgtgtcaggatcgggagtgcggcagccggaaaacggtggcgagaaaaacaaacgcccgctgtccgaactgccataagaaaatggagcttcgcggccagggtgaaggccaaaccttcgcatgtgtgtgcggccaccgggagaaattatccgtctttgaaaagcgcaaagcgaaagataaatccggacgcgcatccaagcgggacatcaactcttatatgaaaaaacaaaacaatgatgagccgatgaacaacgcgctggcagaacagctgaaaaaactcggcctggataaataaatgagagaaaggcagcatttgtaaagaaatgctgccttttgtcgtgttttttactgtattgggaatacaatccatacaaagagggaaaaggggagcaggcggcgctcctatttttaaaatttaccaatgtgaaaaaatgctagtattctttgatcgtttcttatatagtaaaaatactttgtggaaaaataagatataggtataaaaaaggatttgtgaactaggaggatagactgtgaagcgtttcggttttagtttgatgatccttttgatttcgatcgtgctgacggcaggatgcacggaggccggcattgaaaaacagacggccgttgaaccgtccgaaccccttcagcccgcagagcattttatttatcataaactgatgaacggacgcggaatgatcaagacgaacatatccggtgaaccggaatatttatctgagtctctcggactatggatggaatttttgctgagcaggaaagatgaacggcagtttcaagcccagtatcagctgctcaccgattcgtttcttatgaaaaacgggctcgtgtcgtggaagattgaccggaataaagcaagcggcaccaatgccttaattgacgatttcagaatcatgggttgtctgaatgaggccgcatctctgtggggaaacagtgaatacgggaaaacagcggtgcaaatcgggaaggcgctggaaaaatacaatacgaatgacgggtattttacggattattatgatgccgcttcacatgctgcatcaaagaccgtgacgttgtcttatgtcagccccggcgccttacagatgctgagagaacaggggattatcgatgagaaaacggaaaaccggaatcttgatgttctcaatcttgcacccctgaaaaatggctttctgccgaaatcgttcaataccgaaacaaaggaatacaaatatgacagtgaagtcaatgtcatcgaccagttatatgccgccgtgaatctgaaacggggcgatgacaaagccgccgcgctgtcaaaatggatcataaatgaatttaagtcgcgcggacagctgtacggacggtacagcgcagacacgaaggagccggctgttcaatacgaatcaccgtccgtttacgccctggccgttctttttttaacagagcaaaaagctgatccggctgtcatcaagccgctttatgaaagaatgacttcatttgaaacgctggaaacgctgaaacctgattacggcggctatatgagcgggggcgatacacattctttcgataacctgctgccgcttctggctgaaaggaaattgtttaatgaaaatatcattcaatgaatcacaaaaactatgcagctacacagctgtgatgacagtgctgctgtcattttttatttactatgtgtcacagcaatcctcagggcttctcatgacctgtataacattgcttgtcgcgggagccggcttatggtttggggcgatctacgcgctcgtcatcactttactcgtcttatttgttctcggcagcctgctcctgtggtttcagaccgggagttttatggcgtctgccggtgccgaaggtctgcagatgctggtcgtgtgggggatcgcgctgctgctcttttcctacatgtcgggaagaatacacgatttggccaaggggctggatcgctcagttaagcagctgcgggaagagatcacgagctttgtggccgtcgacagggtgacgggctttgacaatcatctccggatgaagctggaactctctgaggaaatcaagcgggcggaacgctacggcaattccttcgtctttttgctgctgcacatgcattatttcaaggaattcaaatctctctacggagaaaaagagaccgaccgcctgctggcatttatcagccgccaaatccgttcaagcgtacgggaaacagacaaaaaattcaggccgtctgccgaacggttcggcatcgtgctgacccatacgcctgaagaaaacatgccggccgttctggcgaagctgaaaaaggaattggatacgtacaggctgcaaaacggtaaatacgtctcaatcactttccgtgtatgctatttggcgtaccgaaaggatttaaaaacggccgatcaatttttaaatgaactggaaaacgagatgatgatgaatgaactctaaatggatatgtctcttattggcggcgctcttcatggtttcggcggtttatgttccccgtacggcggaagcaaaagacaaaaaggacggcattctcattatttatacaagcacggacggcgaagaaaccgctgaagtcaaaatgcttgatttgatcgcgggccatttctcatccgccgtcaccgttaaaagcgacggagatatcacagccgctgaccttaaaaaaaatcggcgagtcatctattacggcgtaacgaagaaaaagctcagcaatcattttgtatctctgatcagcagcatgccgcagcagctcatcagcatcggctataacgccgggcagttccgccaatttacgggtttgtccctgacagaaaaagaaacggtctaccgcatatacggcaagaaagaaaaaacagacatgccgcttgaaaaaggaatgtccgtgctcggcgtatcaggagtaaaaggggaacccctttatacataccgatccggtgacggcagcacccgtccttttatatggaaaacggcgcgctctgactgctatttcggtgtgaccagcctgttaaatgattcgtttctgacggcgaaagaactgcgtaaggcgttcggagaatcagagggaagcaccttcctttatttgcggcttgaagacatcagcccgatgtcggatgaaacattgctttatcaagcgggcgcttatctgcataaaagacacattccgtttattctggcggtgattccggtctatctcaacccggaaaacggagaaaaagtatatctggcggacaagccgaaaatggtaagcgtcctgaaaaaacttcagcaaatgggcggcagcatcattatccacggctatacgcacgcataccggtacagtgaaacgggggaaggctttgaattctgggatgccaaagcggatcagccgattacgtcggaaaatgcggacgatactccggtcaagcttgaaaaggaacaggattttccgaatgaaaaagcataccgggcgtatgtgaagcctttccgtgaaaaagaaaaaatctatacgagaacgaagctggagcaggcgattgacgatctgacagagctcggcctttacccgctgtcattcgaagcgccgcattatacgatgtctgaagaaggctacaaaatcgcgtcttcttatttctccagcattttcggccaagtccagctcagcggcacgacgtggaaaacctcgggcgcccctccgtttgtcacaaagccggctatgctggacgggatgacgctttatcctgaaacaatcggctttgccgataactcaaaggagaacccgctcggagatatggagaatcgcatctcccggatgattgatttcggcggcggtgtggcgggaggtttctaccatccgtatctcggcatgaaataccttcccgagctcgtcaatcaaatggagcggattcccgacggagagtggcttgatctgaagaaaacgaagcaaacggtgacgtcggcgagcgtcaggatcaaaacggacggagacggaaccattcatgtggaaaacaggattcatccgataacggcctttttcaatcaccatcagcagacgcctctggaaaaagcgctttggattctctccggcgtggtgctattgtttatcatcatgttcgtctgctacgtcctttatttgcgcgccacattaaaaaaacgaatctttaaggagagaagaagccttgagtaacattctgttttttatctcattaagtttaatatgggtgatgcttctctatcacatgtttctgatgcagggcggattcaggcattatatgaccttcgaacggaacattcccaagtggcgcgcaaaaatgggggagctcccgaaggtcagcgtgctcattcccgcgcataatgaggaggtcgtcatcaggcagacgctgaaggcgatggtgaatctgtattatccgaaagacaggcttgaggtcatcgtcgtgaatgataattcctccgaccggacgggagacatcgtcgaagaattttcccgtcagtatgacttcattaaaatggtcattacaaagcccccgcacgccggaaaaggaaaatcttcagcgcttaactccggtttcgccgaatcgaacggagacgtgatctgcgtgtatgatgcggacaacacaccggaaaaaatggctgtgtattacctggttctcggtctgatgaatgatgagaaagccggagcggttgtcgggaaattccgtgtcatcaacgcggccaaaacgctcctgacgaagtttatcaatattgaaaccatctgctttcagtggatggcgcagggcggcagatggaaatggttcaaaatcgccaccatcccgggaacgaacttcgcgatcaggaggagcattatcgaaaagctcggcggctgggatgataaggcgctggcggaggataccgagctgaccatccgcgtgtataatctcggctatcacatccgctttttcccggcggctgtgacataggagcaggagcctgaaacatggaaggtctggtggcgccagcggacaaggtgggcgcgcggcaaccaatacgtggttctcaagtttttatcccaatttttcaagctgaaacgcaagcggattatcttcgatttgttttacttcttttttacgtattttctgtttttcttcggtgtgatcatgtcaaacacgatttttatcatcaatcttttttacgacctgcatctggcagtcgggtttttggcgatgattttgtggatactggcctttttcctgtttatgaccgaggtcatgattaccttaagcattgaaaaaacagaaatgaacaaacaaaacttctttatcgtttttctcatgtactttacctactcccaggcttggatcgtgctcgtcatctggtcattattcacagagattaagcaccgcttgttcaagcaggaagtcaagtggtacaagacggagcgatacaatcaaaataaaagcgggtgacctttttgaaaaaagcgatcatattgataacaggccttttgctattgatgtataacgggcagacggccgcggctcaggaattaaaaacggacggttccgccctcggaaaaagcgccggcgcaaaagagcagcaggcgctgacgggtgatctgatgacactgtacggggcgaaagacagctcagaactgacctaccagattcctgcgggggcttcagatgccaatcagtcgcttctgattgattacgaggcgtcaaatttattaattgccccgtcttctttaaccattgccattgacaatgaacccgtcaaatccataaagcttgacggcagctccaagcggaaaacggtaaagctcaatctcagcaaaagccaatccgcccaaggctatcacaatgtatcattgcaattttacggtgtattaaaagagggtgtctgcgtcaggcaggatacgtcaggcaactggataaagatttatccggacagccgccttatgctttcagaagcaagcaagtccaagggagcggatctcagccatttcccgtatccgtttgcccaatcaggcaatacgggtgaagaaaccgatattatccttcctgacaaaccgacctcggcggaagcggaagccgcagtcaaaacagaaggatttctgaaaacggcggacagcaggctgaaagtatcatacgtaaaagaatccgatgcaggcaaaatcagcaatccgtcaattgtcatcggcgccggacatcattggaacggcaaaatcaaacagcttatcgaacggggaaatatcaaagcggaaggaaacaaactccttctcgcggaacgggtgctgaccgccggagacaaacgtcagcccgtcctgtttgtcacggcacaatcagacaaaacgctggcagataaaatccgcgtcattacagacagcgcttattcaggccagctgagcggagactcactgatgatcggccgtcttcagcccgctgctgaaaagacaggcaataaactgacactagacgatttcggcgcgggaaatgtaacggtcggatcaaacaaaacggcgtcagagcacttcttttaccctgcggcggccgctgttgataaagacgggcaggtcaagctttcgctcacattaaagacgtcggaatcggtccggacgaagacggattctaaagatgttgacgctgagagagcagagcttaacgtcatggtcaacggacagccgaatgcggtgcatcttgatgatctcggcaataaggataaagacgggttttatcacgtcacaattccgattgatccgaagcttttgcgaagcagcaggtatattgatctgcaatttgtcacatcaggtttgaaaaataacaatccgtgtatcgaccgtgacgaaaacaaatgggtctatattgataaaagcagcacgctgacttacccggtaagcggcgcgacgcaaaaaccggatttcgggcaatggccgctcccgtttgcaggtgacgtgaagaagaaaacagtgatcgtcatcccggataacgtaaacatgcagacacttaaagaactttctctggtgacggactcattcggaaacggcgcccgtcaggcatttaccgttaagacggcatcagatatgaaggaagcggacgccaaaggccggaatgttgtgtttatcggaggcttgccgcaaattccgcttttgaaatcaaacgcatctaagcttctcgtgccgtcagaccgaagcggcgcttacgatgtttcttcgtttcagatgctgaatgagacgacgaaacaaatcgcatttacacaggaatcaccttgggactccggctccggcatagctgtttttgctccgttatcaggaagcggcgcggctgtcacaaaagagctgatcagctttttagacagctcaagcgaagcggcaaccgtcatcaacgaaacgggcagcaagcagctgttttcgaaccatcagcaaatcaaatccgatgacagcagtccatcggctgatacgaaaaacccgtccgccgcaccgaacgtcacgtatatcgctgttttcgcagcgcttattctcattgcggccggtctgatatggctcacggcaagaaggaaaaaaagaaaaacgggcaatgaaaaaagtgaagaataatgaaaggaaaagaggctgttaacaggcctctttttctgtatttttatttccatttttgggggaggtttttttatttttgaaacagcataaaagcccctttacaaccggacgggacgggagtatgatctcttttataatctatatcgcttaatctgtatccagagcgggggaaccaatttgcggcgcatgatgccgcttggggtgaatcctttttcaggtagggccaactctcataagcccgaatccgacagctaacctcgtaagcgttcatgagaggagatgaatgaaacctgtgcacgattatggcgcaggggcatccgtttgcctctgtgtttttttgccgtgctgaaatatggcatgcaatcagcattcggagacatcatagcagtaagggtttgtaaatcaaacggaaaatgaaaaaaaggggaagacaacaaatgtaccattcaatcaaaagatttttgattgggaaaccactgaaatcacaggcggccggagagcagaaactgacgaaactcaaggcgctcgccatgctttcttcagatgcgctgtcatcagttgcttatggaacggaacagattctgatcattttggccacggtaagcgcggccgcgttttggtattccattccgatcgcttgcggcgttctcattttgctgcttgctttgattctgtcctacagacagattatttacgcttatccgcaaggcggaggagcttatatggtttcaaaagaaaaccttggtgagaagccgggcctgattgcgggcggctcattgcttgttgattatattctgacggtggcggtaagcatttctgccggaaccgacgccattacatcggcatttccggctctgcacccgtatcatctgttcattgctgttttgcttgtgattctgattatgattttaaatttgagaggactgtcagagtcggcgtccatactggcgtatcccgtctatctgtttgtggcggcgcttgtccttttgatcggcgtcgggctgtttaagctcatgacggggcaggttcatccggccgaacacacgccgatcggcacacccgtagcgggcatcacgctgtttttgctgctgaaggccttttcttcgggctgttcggcgctgactggtgttgaagccatttcaaacgcgatcccggcttttaaaaatcctccggcgaaaaacgcggcccgcactctggccatgatggggattctgctggcgatcttatttacggggattacggtgctggcgtacggatacggcacaggaccgaagcctgacgagaccgtcatttcgcaaattgccgcggaaactttcggccgcaatacggtgtattatttcattcaaggcgttacatcactgattctcgtgcttgcggcgaatacgggcttttccgcttttccgcagctggcgtttaatttagcgcgcgatcagtatatgccgagaatgtttacggttcgcggcgaccgattaggcttttcaaacggaattatctttctcggtatcgcatccatcctgcttattctattattcggcggccgcacggaacatctcatcccgctctatgccgtcggcgtgttcatcccgtttacgctgtcgcagacgggaatgtgcatcaagtggatccggcagaagccgaagggctgggccgttaaaatgctgatcaattcttgcggcgccgccatttcatttatggtgctgtgcattttatttgcgacaaagttcaatcttgtctggcccgtgctgttattcatgcctgctgtcgtcatgctgtttttcgtcattaaaaatcactacaccgcagtcggcgaacagctgcgggtcgttgatcagcagcctgaagaaattaagggaaccgtcgtcatcgtccctgtcgccggggtcaccaccgtcgtccaaaaatcaattcagtatgcgaaatcattatcggatcaggtcattgcggttcatgtttcctttgacagagaaaacgaaaagaaggtggaaaagcgctgggaagagcttgataacggtgtccgtctcgtaaccctgcattcctcataccgcagtctggttcacccgtttgataaatttttggaaacggtcgaacagaaagcaagaaaagaacagttctccgtaatggtgctgtttccgcaattcattacgaaaaaacgctggcagaccatcctccacaaccaatcagccttcttgctccgcgtccggctgttttggaagaaggacatcatcgtcgccacactgccgtatcattttaaaaagtaacatcaaagaccgcaggccttagtgccgcggtctttttttcgtcaaacgctgagaatgctacaggtgcacgtccccgtgtttcaacccgttgtaaaaagggcatgaatacaggtaaaaggaggatgcagtatgccaagtaaaacagcaggacatgtaatgacagagctgcttgaacaatggggagtcggtcatatatacggcattcccggagacagcattaatgaatttatcgaagaattgagacatgaacgaaacaacctgacattcatccaaaccaggcacgaggaagtcgcagccctggccgccgcggctgaggcaaaactgaccggacagatcggtgtctgcctttccatcgcagggccgggggccgttcatctgctgaacggtttatacgacgccaaagcggacggcgttccggtgctggcgattgcgggacaggttgcttccgatgaaatcggccgtgacagctttcaggaaatcaaattagagcaaatgtttgaagacgtggcggtattcaaccagcaagtacatacggcagaagcgctgcccgatcttctgaatcaggcgatccgtacggcttacagcaaaaaaggggttgccgtcttaaccgtatctgatgatttattcgcgcaaaaaatcaaacgggagccggtttatacgtcgccgatataccttaaagctgatatagagccgaaaaaagagcatctcgtgacatgcgcgcaatatattaacaacgcaaaaaagccggtcattctcgccggccaagggttaaaatcggcaaaagaggagctgctcgcattcgccgataaagcggccgcgccgattgtcattactcttccggcaaaaggcgtcgtgcctgacagccatccgcactttctcgggaatctcgggcagattggcacaaagcccgcctacgaagcaatggaggaatgcgatctcttgatcatgctcggcacatcgtttccgtacagggattatctcccggacgatacgcccgccatccagcttgattcggatccggcgaaaatcggcaaacgctatccagtcaatgcgggaatcgtcagtgatgcggctcttgggctgaaagagctgacggaatacattgaatataaagatgacagaagatttttagaagcctgcaccgagcacatgaagcattggtggaaagaaatcgaaaaggatgaaaccgaagcgactcatccgctcaggccgcagcaggtcattgcccggcttcgggatgctgccgcagaggatgccgtcctgtcagtggatgtcggaacggtcacggtgtggatggcccggcattttaaaatgaagaagcaggactttatcgtatcaagctggctcgccacgatgggatgcgggcttccgggagccattgccgcaagccttgccgaacccggacggcaatccatcgccatttgcggagacggcggattttcaatggtgatgcaggatctgccgacggctgttaaatataaactgccgattacggttattattttaaacaacgaaaatttaggcatgatcgaatatgaacagcgagtcaaaggcaacatcgactacgtcacccagctgcaaaatgtggattacgccgcctttgcagaaagctgcggggcaaaagggatcaaagtgacgaaacacgaggaattggctcccgctttccatgaagcgctcaactcaaatgagccggtcgtcatcgacgccgtcatcggcgacgagccgccgctaccgggaaaaatcacctacggccaagcgaaaggcttcagcaaatacatgctgaaaaacttctttgaaaaccaaaaaatcgaaatgccgtctctcaagaaaagcttaaaaaggctgttttaaaagccggcgtttataaaaaataaacaggcagcatgcctgtttatttttttatttgttattaggccctctcatttactcagttgagccgtagtaaaagcccggctgtttgttctgttttttcaataatgtcatgtcggattatatggtatagttcaaccaatctccaagagaaccgcccatctttttatagaacctttgtgcacggtaattatcagctgcagttatccacgacatatgtgcatacccgttttcttttgtgaatgattcgcatcttttaaacagttcttgggctgctcctgtacctcttgcgttttctgccacgaataaatcattcattactgttattttatctgctttcgttgtgctaaaactaaaatataatgttgcaaagccaatgagcttaccatcttgttcagcaacgaattgaataccgctgttcttttcaaataacatttcaatcaaattatgtatatgttcaatcggcggtttaggtcttttataaaaatcgacgatatataaatacattaaatcggtcaattggtttatatcatagggttctgcgcttctgattatcaaatgtttccctcctcactctgtttattttattatataaaacttacaaaaacattcggaattatgcaatatctttattgggactgtcttattgatccattagttcttatcagttttactgacctctttcatgataaggaagtgctcagtagttcaaacctgcttggaagcttagaggacgggaaccgaaagtctatcgcattgaaatctgtggaaatggcatgaaatcagcgatggctgatcaaaaaacttatgaaggaccaccttatcagcaaaaacgggaaaaagaccggtggggcgacgtacaccataaagaaaggggatggattatccgtcatagcacagaagacaggcgttagcatggcaaccctccaaagcttgaacggtatcaaggacccgaacctgatcaaagtcggccaagtattaaagctgaccggttcggccggcaacaaaaggcaagaaatcatcttacacgttgccgccaggcgtttttaaagagacaagccttaactaaggggacggccgtaaacagattcaatcggctctggcggctctctattactacccggacaaagaggcaaagaataatgcaatagacggctattacggatcgaagacagcaaatgcagtcaaacggttccagtccatgtatggattgactgcggacggtatttacgggccaaaaacgaaagaaaaaatgttgtctcttctgaaataaatgaaacagccctttaaagggctgtaccacaattctatatatttcataaaaataaagaagtatatagaattgtggttcgtgccaatggtagaatatgtttgttggaaatgatatttcaaatacttgtaaagttgtgtaaaatttgaaggttaaccttacgaagaaatagtgaaacaacacattgcctggtaaacattgtttaaagcccaaatcctatagttcagttggcactacatgtcccgattttgtgacattatacactcaatagaaaagattaaaatatcccgaataattcaaaaaaggtgtttacaaaccttatttagttcctatatcttagaaaagaaggaaaaattattcaatagggggatactgatgtgaaaaagagtaaatttttacttaccaccatgttctctacaactatgttgatttccggtttaggattgggatttgggaaaagtgcacatgctgaaggatttccgcaacttactaatgaaaaagtccaaacggaaatacaggaaatgaaagatgccggcatgacaagtgaggaagtacagaaattctatgaaatgagtaaagaagagtatgcgtatgtacaagaacatgcggaagacttgtataaggattcccaaaaagaaatcaaagaattgaaagcctctggtcaaattgatgaagttcttcctaaatacgaggagcctgaatatcagcacaagaaccaaatcgcagcaaaagcgttaggtacaaaaggtgatgttcttacaagctatgaaattaattctggaagttggtctattggtgtaggacatgctgcgattgtttcaactaacaaatcaaaaacagttgaagcatgggcgaaaagctggagtcctataaaccaagatggagttcgcagatataataataactggggaagtaaaaagaaagtttatggtctatgggttaaaaagtcgaataacaataagtatataaatgctgcaaaatatgcggaaaagcaagcagataataaaaagaaatataatttcaacttttttaataaaaagacaactgctaaattttattgttctcaattagcttggcgttcttggaaaaaccaaggtattgatattgacaatgtcaaatgggacactgttgtaacaccaatggagcttgtaaaatccaataacacaacaatcttttatcacaagggttaacattgacaaaaacaatcggtgctgcaccggttgttttgtcatttcaaagggaggaaaaaatgaatagacttaagaccctgtttattttcatttgcatactgatagtcacaacctcttgtagtctcatcccaactgggaatgaaaaagaggaaagaagtagtaatagcaagactgcattaaagaatattgacaatgcaaaatttattgttggtttttctaacactttagataggggaagtgagattggggtttacagtgaagatggtactaaaatggatagcttggaattgaaagatggtataaatttcacgatgtcttcatataacaaaaacgatacgttcttctcatcaaatagaagcaataatcacttgatgatagacaataaaactggagcaataaacaaaataaatgaaaagagtttgtcgaaaacaactgaggatgaaggtgctttctttataaacagttctggcggttatatcatccatgacattaacgttggatatacagacaaagggctggaaagtgaactggtatattggaagggaaacagccgaaaaaacaagaaacaaataaagcttgacggagaacttggatcagcaatcgtcgctaaaaataaaatttatgtcatttcaagtgatgaagaaagtatgtccatcatttcaattaacctagagacaaataagcaagagaacaaggcatccataccgaataaagggatatacttcatggatgaaaaggatgcattccaagctctagatgaaaatacatttgtactggcagttaatgataacgtgaatgagaaagagaattctaagctcatattaatagacagagagacgcttaaggtaaaaaaagaagtcgagatggagaaagggtttcatcctgcaaaattgaaaatattaaaagatagcatcttagctgtttcttttgatgggaagctgcaggtgtttgataaaaaaatggttaagaaaaaatctttcgatttttatgctggggatgataacaaattaatgaatgatgttcaattcaatgacagagagatgtatgttttactcaaaaactttgatatccagcgtgataacaagcttggagatatcacttcttatgatttgaaatcaggaaaaaaggtaaaaacaatcccgctaaaagcaaataaagagtgggaaatcgcccggttcgaaattttaaaataagttggaggtgtttatattagcccgcttttgagccctgcatatatcatactcatcattcttccggcagcttctttcttgctggggataatagggtatttcatctttcaaaaagtatggactatggttgtcgtcgtattgatcctgtcattgatatttatgtttgttgtaataggagcagagccaacatttttagtttgggtgtttatcatgacgggagcctgccttatctccggttcaatcactaagactataatgaattttacaaagcgaaaatattaaatggaataatcataagagtgtacaccaaaaccataatcccaaaaatcccgcgacgaaaattgcgggtttttttcgttttcactttttgttcaaatagttataatattacaaaaatagagattagagggagaggtatatatggaccaagttttgccgtcgtcccaggttggtgtcaagatcaatgaatagtacaaaatgattcgtcagttcagtgtgcctgatgctgagattttaaaggctgaagtagaacaggaaatagaggagatggaagaggatcaggatttgcttgttttttattcattgatgtgctttcgtcaccaattgatgttagattccttggagccggaagacagatatagagatcgccccacagtcgacgaactgcttgagaaaatagaaaaaccgcaaaaaagacttacaggcctcttgaaatattactcattattttttcgtggtatgtatgagtttgatcataaagagtatgttgaagcgataggctattatcgcaaagcagagagagagttgaatgctgtatcagatgaaatggagcaagctgaatttcattacaaaatagctgatgcctattatcaaattgatcagcactttgtttccctcaatcatttaaaaaaagccaagcaattgtttgaaaaaagtcaattatacaaagtgaaagtgattggctgtaatatgatggttggtgctaacatgtacgatatgtacaggctgacggaggccgaatcatattatcgggaagcattaagtatcgtccgcggcttggaagaggaaaaagtgaaaagaattataggagtgatctttcataacttaggcttagtttatttaagagggaaaaatttgattgctgctgaagagaatttcaaaaaggcaatagacgtgaaagaacatattgatacagtgtatggggtgagatcattatatatgatggcaaatgtcctgtaccaatgtggtaaagtcaaggaagcgcgtttcttttatgaaacggctttaaatcgtgcccggacttctaatgaagaagaatatttggctaaattaaaaatcattaattcattatacgaggaatataatgaaacagcagtgaaacaaagcttaggttacttagaagagaaacgcctttggtctgatttcgcagagctaactgaaaaattaggtgactttcattttgagaagaggaactatgtagagggaagaaactttttaaagaaaaccatacatgcccaaacacaaatacttaaggttacggaggctatataatgaagaaacttttaattagctccgctttaatcggtattcttttcactggattattaagtgtgacaaatgtttatactgctgaattgaatgagtctggaactttttatatcgccgaaaaagctataaatatttaattgtactcccaattcagttccccgccttttaaggttggggtttttctttttaaaatctccaccggtgtttgtgcttatcccatttcaacatacgctgccgcatgaggttcttgaccgcttcacgtatagcctgtaatcctttaccggtttttctcttcaactcatccattgaggatttttcccgaagtgagtcatgttaaagataatccggtacattttttccgctcaaaatcattcattcgaattacctcctcgagtaaataatacaagaacgaacattcccttttcaatttgaaaagcagacagacaaaaactttcaggatggacctgaatccccctctaattatagaaggggattcagcaatcatccgtaatcttacaaaaaggcaagaagatgctttgcacgctatatcgaatttcttaaatcagtatggggtgcatcaatgcctctatgaatcgccaaataaggcgtttttttcataatatctttcacagcctcgctaaaacgatttcacaacattctgatctgaaaattgttggccaatcatttccgcctggcttacagagttgttttggatgacgattccagtatttaagcctccggatccaaacgctgtttttgaagcggtgataggggtgatggttaacgcgccgccgacattgacaactccgtttcctgataagttgttaattttaataggggaaccatacatactcttttctcctctcacttcaagctgctaactatatgtatgctgtcattttgaataagattaaacaacgcggcaaaaattgccgaaagctccggcaatttctcttttgctagggataatagagcatttcatcttttgaaaattttcattgatatgtttgttgtaaggggcagagaacgtttttcatttgggtgtctgtcttgacaggggtttgccttatctccggtaagataatttcaaggaaaaacaaaacaggctgtcgagaagatcccgacagcctgtttatttttgtttgcgtgaaagagcgaagaaaaacgggaaggcggaaccggccaataacgtaccgaataaaaacattcccccgatgaacacatgatagttcactccgccgatccaaagccccgtgattaaggaaacgatgctcaatgcgatcatcacaaagccgggaatcagacgtttcttacccgttgtccgataagcaataagagaacagaagatgccgatgacaatcggcacaatccacagataaaaaaggataaatactgacataagcaaaactccgattttttcttctatcataccaaaaacgcccggaaaaagatacgaacgagagccgacggccaaaagaaaaaccggccgagatgggccggtttttctaacggaatgaatcgtaaatcacaaacagattaagcgcgatcaccaaaaccgcaatcagccaggcgagagccgtaacccattttcggttcgtcaggacgcccatcaggcgtttgttgcttgtaaacataatcagcggcacaagcgcaaaggcgatgccgaatgaaagaacaacctggctccatacgagcgcttctgtggcgttgattcctgagataatgatgatcatcggaggaatgatggtaatgaaacgccgcaaataaagcgggatacggtaacggatgaagccctgcatgataatatcgcctgacaatgtgccgacagaagagcttgaaagccctgcggccagcagtccgatcccgaagagaattgctgaagccggcccgataaagtggccgaattgctgataagccacgtctaaatcctccacatacagtccgttcttgaagaaaagagcggccgcgacaatcagcatgcttgcgttaatcgcccctgcgattaccatcgcgatgagaatgtcaatcgtctcgaatttaaaaatctttttccgctcgttatccgtttttccgacgacacggcgctgcgtcagggcggaatgtaagtaaatggcgtgcggcatcacggttgcaccgagtatcccggttgcaagaagcacactgtccattccatcgattttcgggatgaacagcccttcgagtacggaagcggcgtcaggcttggcaaagaaggtttgcagggcgaaggcgatcaccacgacaaacagaagtccggcaatgcccgcttccagcgcccggtaaccccggcgctgaagctctaaaatcgcgaatgatccgatcgccgcgataatggccgcttcaatcatcggtatgccgaacagcagattgagcccgagggccgctccgataaactcagccagatcagtcgccataatcaccagttcaccctgtatccacaacccggcggatacccatttcggataccggtctctggcgatttccggaaggtttttacccgtggcgatgccgagcttcgcggaaaggacttgaattaaaaaagccatcaagtttgaaaagagaatgacccacaacagcatatacccgtatttcgaaccagctgagatattcgtagcgaagtttcccggatcaatgtaggcaatcgccgcgataaatgcgggacctaaaaaaggcagaagccgcttgaatcccttgcttttgccgtcaagtgcatcctgaacggcttttgattgcagtgattgtgctgagatgtctttgctcattatgtctcacctaaattccgatagatttttagctaaataacaaaaagtttcctagacgcaaattattttatctacatcataaatccgctattatgagttgtcaagctctttatgttcaataaccagtacattttttccccgttttatctatgatatgtatcccgtccgagaaaggtccgaaaatgcaaaagacatcgtttcggaatagaaacgacgccgttttcaaacgatgtttccccatgcgcggatcctttgagcgttctttaaaaaggtggaagagtacacttgcccataaaacgtcagaaccttccgatcgccggcactgaatggagaaaaagccggcacattgcctccgtgtgccgggtaaatagaataataatgaatctttcctttggaagataaaacctttctgtaccattcaaatgacctccggcaaaacctctgcttctctgaataaacgtttgaatccgcggtatataagtgattcaggaccaataaaccgcagttatttatcaaaacaaagaaaggttttatcatttgcgcagaaatgaagttggagcattagacttatttcagtcttcctggcaaaaaagtataataacgtcaggaaagctttccagccatatgataaaagagggggaattttcttggtacgtcgtttgtcggtcttttctttagctatgatttttgctgtttctttattcgcttttggcggctctgcatcagctgcaacttttacacctaaagctgaaccggacgtttccattttagcaagcgggggaacagtcggtatttacggtgctaacatgcgctcatgctcaaaggtcagctgttcaacgattacaacattctcaagcggtaaaacaattacaggtacttgggtaaccggagaatatgtacaaggccactacaccaactctaataaatggctgaaagtgacgtatgcaggagcgacaggctacgtgtccgtcaccactctgtcttattattacggtttataatcagaaaaacccccgttcttttcagagcggggtttttccatgtattccggtttaatttcctcgcttcgtttcatcatcgtgtttcatcagctgatcgatttcttccttagaagcgttttttttccactctttcgcctgacttgtcgcaatgggaatggcccgtccttcttcataaccctcatctaccatcgcattcgcgatttcgatcgcttttttcctcacaggttcctcgagattcttcaatgattgcggataatccttcatagaccaaggcatgtctatcactcctttatgaaaagtgtttcccgcctgaagaaaaagaaaaccgcctcatcaaaaagaatgacagctatttttacgagagaccagcaatttccgaataaaatataaaggataaagaagcaaatacagattgaatgcccaccacatcagatcaaaatcaccgataaatacccaaaaggcaatcgcttgcaggcctgaacaaaaggtcagcacaagtgatattaatgcgaaagggcgccataacgcatgtttccgtttataaagaaacaagctgtacagcccggttatcgaaatgaaaatatctaagggaaagaatgaccagttccaggccattatcatggcgttatcatagtctttaaacaccatgttttttggaatccactcaaaaaaagtaacaatccaataaacgataaatccaatatctgtaatgaggaagagaacctttaaccctttcatcatcagtttctgtccgtatgaacgctgatgccgtttgatgacgtttcactttcagaaataaagtttaaggtaacgacaccgatgatgatcagaagaacagcgacagcttttatgacagagaactgttcatggaagaaaaaaattccgataaaggaaatcagcacgatccccattcccgaccagaccgcatacgcgatggagacacttatatatttcaaagtcaaagtaagaaaacataggctgccgatataaaacaataataataaaatactggggacaagttttgtaaaaccatttgataatttcatgctgaccgtacccattacttcaaaaatgatcgctaaactcaaataaatccaatgcattcaacattctccttcattcgtattattcaaaattatacaatatatagaatttaaagaaaattaaacaacggaatgttttccggataaaaaacccggtcgggtaagaaaacaccataaaggtatactatgtacaaagacattcggaagggacgtgcaggacgggtgacagaagaacggacagacctggaaagacaattgaaagacattcaaaaatgggaaaaggcgcagcagagggtgatgttctggaaaacgctcacccgcctgccgtttcagcttttggacaagctgacacctcaatttattcagcggaaaatcggacgcattctcgatgaaacgggaacgtttattcagtcaggcggacagtatctcacatcagaaaagcgcattatcaaaaagtttcagaaacggctgccgcacggcacatgtcaaacgcttctcgatatccggaatgcaccgcttgccgtcatggatgaaatcgcagaagccatggcgcgcacaagcgtaaagaccgccacggtgcagggagccgcaacgggagtcggcggcgtgtttacgcttgcggcagatattccggcgatgctcggtctgtccttaaagacgctgcaggacatcgcgattgcctatggctttgatccgaaagacaaaaaagaacgcgtgtttatcatcaaattgctccagctggcatccagtgacgtcatcggaaaaaaagcaatcctgcgggatttacagcaatatgaccaaaacgaccaaatctatcagcgcattgcctcgcaaatccaaggctggcgggaagtcgtttacagctaccgcgacacgttcgccgcgaaaaaactgctgcaaatggttccggccgcaggcatcgtcttcggcgcatccgccaaccgttcagctttagaaagcattgcggaaacaggcatcatgctttataaaaagcgccggattctaaaacgcctgaaagatacagaatgataaaaaaccacccgaaaacacattcaatgtgttttctttgtttatgagttctgaaatcgggaaaccaacaaccaacaccaattaaaggaggaattcaaaaatggcacaagaaaacaaaatgagcagagaagaagcaggtaaaaaaggcggacaagctacaagcaataaccatgacaaagaattctatcaggaaattggtcaaaaaggcggagaagccacaagcaaaaatcacgacaaagaattctatcaggaaatcggtgaaaaaggcggagaagccacaagcaaaaatcacgacaaagaattctatcaggaaatcggtgaaaaaggcggagaagccacaagcaaaaaccatgacaaagaattctatcaggaaatcggcgaaaaaggcggagaagccacaagcaaaaatcatgacaaagaattttataaggaaatcggccaaaaaggcggaaacagacgcagcagctaataaaagcataaaaggcagacaacctgcagagcaaaagcgatccggcgcatcagctggatcgctttttattttgggaaaatcttgttctgggccgacgttgcggtacaataaatgaaaaaaggagttttcactcgtgtctgaaatgcaaaatttactcgccatcgccaataaagtcaaagaaaaacacgacaatttttcaatcgcggagatcaatgaccactgtgtgcgcctcgcagtgtttacgggagaatatgactggcaccatcaccctgactcagatgaatggttcattgttcttgaaggtgagcttctgatcgattttaaggacaaagaaactgcagtgctcaaagcaaatgacagcctgctcatcccgaaaggcactattcaccgtacacgctcatacgtcagaaccgtgaatctttgtgtcgagcatacgcaagcgaaaacagtcatcacagagggactgccatgctgatcaaaaagattgtatgtgaaacagacgttgcaaacgctgaagtatttgcgcaagcacagtcacggtggggagcattatcacgtgtaaatggcttcgtcaaacaggccggcggctggcggaaaaacgcagacggtctgttcatcgcagagatcatcagtgtttgggagaacagacaggcctatgatcattttatggagaacgaacatgaccgcatatacgaagaaaacgagcagaaggctgcgattctttcaatagaagtgatgctgtacgaagaggatgaacctttcattcacgagctgttacatcatccggacatccgatacgaacctgattggacagttgtgcgcacataaaaaaagcccttttagagggcttttttattttcgtccgggaagcgtgttgtggacataaggcgggacaggatccagcttagctatttcgccgtgcgctttcggttctttttcgtattcgaacggttcgccgtccggcgctttttcctgcagccaattctgttcagcgctttctccgccgtctgagaaatgaataagcttatgggagaatgactgtttttccagcgccttcgggaatgtggaaggaacaatcgggccttcctgtgcctctaattctttaatagccgcaagccattggttttggtgcatcgtgtcacgcgccagcaggaagctgagcatatctttcacacctttatcatcggtcatttcatacaggcgtgcgacttgaagccttccttgtgattcggcgttcagattggcgcggaagtctgccaagaggtttccgcttgcgacgatatagcctgcgctccacggaacgcccgtgctgctctccggcattgcgccgagccctgagacaatggcatggtgcgggttcatgccgcctaaaatggacccgatgaccggatcatccgccgctttttcctgctctgccagcggagcatcttctaacagtctcgcaatcatcgtcgcgatcatttcaacatggccgatttcttccgtcgcggtgtccatcaggagatctttatatttttcattgccgcgtgtattccagccctgaaacaaatattgcatggcgacggatatttccccgtattgcccgcctaagatttcctgcatcttttttgcgaacagcgggtcaggacgatccggtttggccggatgctgcagttttttcgtatgtgtaaacatgtctccatctccttttttatttgtccctacttacttccccgtcaggaaaagggatgaaacggagatgggcgtattggtcctgctaaggatcgcggcgcaaggataacagatcttccacaagcccgcggccgatcacctgctcatattgcccgtaaactgggtcgagacgtttcatccattttttcttttccgctttcgtcagcacgtgaatattgatggatgaattcttcttgatttcttcgagctggtctttattcattttctcagcggaggcttcgttccattccgttgtttctttcatcgcctccgttaagatggttctcgttttttcagtctgtgaattccagaaatgctcgtcggtcattacggcataaccgaggtatccgtgattgctgattgtcaaataatcttgaacattataaaattttttagaatagatatttgaaatcgtattttcctctccgtctacgagattgctttccaagagctgaaacgtggaattaaaggaatcctgccgcggctgcgcgccaagcaggcggtactggtcctcgatcacactgctcggcatgatcctgagcgcctgtccctttaagtcatccggtgtgaagatcggccctttatttgatgtgagctgcttaaacccgtttgtccagtatgccagtcctttcaaatgatgcttttctaaagatgcgaacaggcgggtgccgattttgccgtttaagccttcctgcacggccttatagctggtaaacgcgtatggcagatccaaaacaccccattcgggagagagtgatccgagctttgaggtggagggagcgatgaattgcacgtccccattttggagggcgtttatttcttcattatctgaatagaggctcccgtttggaaacacctctactttaatggtgccgccggacttttgatagaccaggtcggcaaacttattcgcagcccgccctttaggcgtgttttcagcaacgacatggctgaatttgaaaacaatttgatctttcaggccttcctgttcgtcatcataatacggatcttccgttgagaaacgatcatgaaagccgatgaataaagcggttccaataccgagtaccatcaggctgagacaagtcagcaagcttttcatcgaaaaccccctccgccattttctataacaagcataatcgggcgggccggtttcgtaaagagacggaaaggaagaggccaatgacgaaaaaaaagctcaccatccgctggaaaatcaccatactttcttatatcgtcgtgctttttacctttttgatcgtaggcatcgtgctgatcggcaatattcagcatacagaagagcgcgagctgaaaaaacggctgatgaataccgcgcggacggtatctgagatgacggatgtcaaacgcgctctcgagcagaaaaaacagagagaagacgtgcgccatgcggtcgaagaaataaggatcatcaatgaagcggactacatcgtcgtcatggatatggatcatatacgctattcacatcccgtcagcacaatgatcggaaagcgttcaaggggcgaggacgaagcagcggcgttcgccgagcacatttatttttctgaagcaaagggagagatcggcaccgccgtccgcgctttttatcccgtaaaagaccgggatttgaatcagatcggtgtcgtccttgccggtaaaacgctgccgggctttggtgaaattcttcttcagctgaagcatgaaattctgtttatcgttctgttggcgctcggcttcggactggcgggctcctttttgctggcccgccatatcaaaaaacagatgttttggctggagcctcatgagatcgtgagaatgtatgaggaacggaccgctacgtttcattcgatgaatgagggtgtcatcgcgattgataatcagcaccacatcaccatttttaatgaaaaagcgaagcagatattcaatgtcagtcaagatactgatggcagattgatctgggacgtattaaaagattcccggctccctgaaatcgttgagcggaaccaagctgtatataatgaagaaattcaagtcagcggaaaggtgatcatgagcagcagaattccgatcgtcatgaaaaagaaggtcatcggagccgtcgccattttccaggacaggacggaagcagcgagaatggctgaagaactgacaggcgtaaaaaattttgtcgatgcgctcagagttcaaaaccacgaacatatgaacaagctccacaccatcgcgggactgattcagctcggaaaatcagaaaaagcgctccagctcgctttcaaggcatcgtcagaacaagaaagcgtcactgaatttcttcatcaggccattcagaatgacgctgcggcggggcttttgttaagcaaaatcaaaagaggaaaagagctcggcatttctgtgaaaattgatgaaaacagcagcttctcggaatttccggagcatgtcgaccagcatgacatcgtcgtcctgctcggcaatttaatagaaaatgcattcggcgcatttgaaacagcggacacggaggacaaacacattgacatcagtatcgagcaaaatgatgaagtgcttgctatattaatagaagacaacggaagcgggatttccgatcagcacatcccgcgcctttatgaaaaagggtttaccgtcaataaaacggggggcacgggatacggattgtacctcgtcaaacaaatcgtcgacaaagggatgggcgtcattgaagtcgactcacagcagggacagggaacggcattttcaattttatttccgatgaagggggaggaatcattaaatggacatcaaggtgctgcttattgaagatgatccgatggtgcaggaggtgaataaagaatttatcaccggtgtttcgggattcagcgtcatcgccacggccgctaacggagacgagggaatcaggctcataaaagaactgcgccccgacctcgtaatattagacgtgtacatgccgaaaaaagacggcattaaaacgctccaggaaatcagaaaacaaaagctcgaagtggacgtcatcatcgtctcggctgcaaaagacaaagaaacgatccagcttatgctgcaaaacggtgcggccgattacattttgaagccgttcaagctggagcggatgagacaggcgctcgaaaactttaaacaatataaacgcaaaatcgaagagcatgacaccatgtcgcaggatcagcttgacgcgctgcttaaaattccgcaaaatcagtcccggaatctgccgaaggggttaaatcattttacgatgaatgaaattttgacctatatgaaacagcagacggagccgctttcagctgaagaagccgccaaagcgctcggaattgccagggtgacggcgcggcgttatctcgatttccttgaaaaggacggccagataaaactggacattcaatacggaggagtgggccggccggttaaccgctacaaattcgtccgttagccaagaccaaaaagaccaaaatgtccgttatgatcataagcttcccctcccttcatgaaaacgctatcatttgtacatagacacagcgagaggcaagggggagtagggatgaaaattttcaaaaatctcacggtgcaagtcatcacggcggtcatcatcggcgtcatcgtcgggctcgtatggcctgaggccgggaaacaaatgaaaccgctcggcgatacatttatcaatgcggtaaaaatgattatcgccccgatcatattcctgacgatcgtgcttggcatcgccaagatgggagacatgaaaaaagtcggaaaagtcgggggaaaagcatttatttattttgaggtcgtaaccaccatcgcccttattatcggacttctggtcgtcaatatcatgaagccgggtgaggggcttgattacagcaagcttgaaaaaggagatgtctctcagtacacgcaaaacgggggacagggaattgactggattgaatttatcactcacatcgttccgtcaaacatggttgacgcttttgcaaaaggcgatattcttcaggtcttattcttttctgttttattcggggtcggcctggcggcgctgggtgaaagaggcaaaagcattattgatttcttcgataaactgtcacacgtctttttcaaaatcatcggctacatcatgcgcgcggcgccgatcggcgcattcggggccatggcctatacaatcggccacttcggactggattcgatcaagccgctggcgagtctgatgctgtctgtatacattacgatgttcctgtttgtattcgtcgctttgaatatcatttgcagaatattcggtttcagtttgtggaactatctccgttttataaaagatgaactgctcatcgttctcggcacaagctcttctgagtcggttctgccgcggatgatggataaaatggagcgctacggctgttcaaaatcggttgtcggccttgtcattccgacgggatattcctttaatttggacggcacctcaatttatctatccatggcgacggtttttctggcgcaggtgttcggcgttgaccttacgatcggtcagcagattacgatcattctcgtgttgatgctgacatcaaaaggcgcggcgggcgtaaccggaagcggatttatcgtgctcgcctccactttgtcggcgctccaggtgatcccgctggaagggcttgcgctgctcctcggtgttgaccgctttatgagtgaaggaagggcgatcgtcaatctgatcggaaacggaatcgccaccatcatcgtagccaagagcgaaaatgaatttgacgaagtgaaaagcacacaggccgtaaaagaaatgaaaacggcggtataaaaggggaggaacggcatgcatcgggcatgccgttctttttttcggccgctatgagtaaaaaagataaatttgtttaaatttattaggaggtggacaaagaccttagcgtcattttgttatataatttacaattagagagtgaaagatgaaatctaagggctttttgtcctagcaggagtgtataaatggcggctatttttaaattttttcagcatccgggtgtcagacgtttttccgtttttcttgttttgactggggtgttagttgtattccgaagtatgattaatttgattttgcttacgtttatttttacttttctgatggatcggctggagactgtcatcaggcacgtgctgaaccattttttccggatcagccagagggtggtcattaccgttttatatattgcgctggctgtcggagcgactgtgggaggctttgtcttttacccgattgttgccaagcagattgaacagctgattaagcagatcaagcacatcgcgtatcatcccgatgtcatcccgttttatgaagaaatatcgagcgtgttcggcgatattaatatcggttcctatgtaaaagaaggatttaatgtactgtatacatacttggccgatatcagcactttcggtttgcaggtcgtgatgtcactgattctcagcatgtttttcctgttcgagaaaaagcggctcacggagtttatgaaaaaatttcagcacagcaagctgtctgttttttactacgaacttgcttatttcggcagcaagtttgcgagaacgttcggcaaagtgcttgaagctcaatttattatcgcgctggtgaactgtatcctcaccttgatcgcattggcgattctgcattttccgcagctgttcggcctgtcaatcatggtctttttcctcgggctcattcccgttgcgggtgtggtgatttcgctcattccgctcagtatcatcgcgtatacgacgggcggcgctgcgtatgtcatctacatcgtactggtcattttcgtcattcatgcgattgagacttacttccttaatccgaaactgatgtcagcgaaaacggaacttccgatcttttttacctttacagttttaattttctcggaacatttcttcggcatttggggcttgattatcgggattccgatttttgtgttcctgctggatattctggatgtcgtcaataacgaagaggtggaaaaatctgaaccggagccggataagacgtaacatcagctccgctcttcacgaatatatgacaaatgttataatgcagacagtgccttatgtacgggcactgtttattttttgtgaaaaaggaggaaggctgtatgactgagccgattttacatatcgaaggccttgacaaaacaataggcaaaaagcacattttaaaaaacatcagcttggatgtcaggcagggcgagatcatcggtttgctcggtccgaatggatcggggaaaaccacacttatcagaatcatcgtcggccttttaaagaaaaacagcggtacgattacaattaacggttttcagcacgatgctgatttcgaaaaagcgcttgaatctgtcggagcaatcgtagaaaaccctgaattctacccatatctgacggggtgggaaaatctgaagcactttgccaatatgcacaagaacatcaaggaggacaggcttcaggaagtaatcgagcgggtcgggctcgcaaatgccgttcacgacaaagttaaaacgtattccctcggtatgcgtcagcgcctcggcatcgcacaagccattcttcaccgtccgaagctgctcattttagatgaaccgacaaacgggcttgatcccggcggaatgaaggatttccgcaaccatttaaaagagctcgcggagcttgaagggacgagcatcctctttgcgacgcatttattgcgtgaagtggaggatctttgcgactgtgtcatcatcattcaaaaaggtgaaatcaaaacagaggtcgtcctgcgcggcgttgcggaaaaagaggaaaaagccgtcatcgacatccagccggctgacaaagcatttgaatggctgtccgaacagcaatttgctccggagaaaaacggcgggggcattaccgtcaccgtatcgaagaaggacatcccggcattaaaccgggcgctcgtcggacaagactttctcgtgtattccatcatgccgtatgcggaatcgcttgaggatgaattcatgaaagtgacgacggcgcttcaagaggagggggagacgaatgtttaaattgacagcaaatgagcatatgaagctctttaatcgtaaagtctcattagtggcgcttattctgatggccgttctccagtttattatggcgcttgtcattaaacggcttgtcatcagctccgggacggatgagaatttcatcggctacatggcgtacgcacccgggctgaatattctgcttgaggcattaacgatcgtgatcgcggcaacgatcatttccgctgaatttgataagaaaacgatcaaatttttgttaatccgcccggtaaagcgggagcgcatttttatatctaaactcattaccgtatttttggtcagcctgtacctgtatgcggcgtactatattctgtcactgcttttcggcatcgctttcttcggtatgtcggtgacatctgaatcagggacgctcctcgtgaacacgctgaaagtaatcggcacgaactgggttgaggcatttgcgatggcatgcttcggattgctgtgctcttccttattccgaaacagcgccacggctgtcattttatcatttatcgtgctgtacggcgcaaaatcactcgtgacgattatgtctctcttccaaaacaaatggggaagcttcctgctgttcgcgaatactgacctgacgcaatacatgagcggggcaaaaccgctgtttgcgggaatgacgccgttattttccgtgggcattatcattatccatatcgtcttcttcttagccgtcgcttggtggagtttttgcaaacgcgatgttcgggtgtaaagtaaaggaatgacatttttgtgaaaaagatcacgataaatcaataatttatgctattttgatttataataaaggtaatgacggaggtgctcacttgagaaattttattaccgcattaccgattgtgttattgcttggtttttcctttgtgtcattcatgttccaattcgaacatcttgtttatttcaggcttgcgctgggattgttttctacagtgggtctgtttctcttatataaaatgaagacgggattccgttatttcatcatctacctgtatgcaagctggatcgtgcttgcggcagttaccgcttttgaagagccgattttctcaagctttttctttggcgggcttgtgatgacgatgggttatctcacatatatgctgatctatctcgggctcaagcaggatcgcggcccggaagcagtctaaaacgcgctattctacggaatagcgtgtttttttgtacagcctcacagttgcggaacgagacttgaatctctataatacttattaactttatcggaattataatggggggattccagtgtctttatggatacagaacgaacggcagagagaatggatggaaaaaatcggccttcttgcagatgaatttcaaaaaacagccgcgcttgatgatgaagagggccgttttcccgcagagaaaattcaaagattgcgggacgcgggatatacggcgctaacggtacctgaggctttcggcggagcaggcatctcggtttacgatatggtgctgtttcaggaacggctggcgaggggggacgcggccgtagctctcggaatcggctggcatttatccgtcatgggagagctcggagaagaaaacagctggaatgaagatgtcttttcatttatcgcagaagaagtgaaaaagggagccgtcctgaacagggcagcgacagaaaagcagaccggcagcccgacgagagggggaagacccggcacttccgcggtgaaaaaagacggtcaatgggtgctgaacggccgaaaaacctttacaaccctttcactgactttggattatatgctggtgacggcatggattgaagaaaagcaaacgaccggcgtttttctcatccataaagaccaggcgggcgtttcggtcgaagaaacatgggatatgattgccatgaaggcgaccggaagccatgatctccttttagatcatgtcacggtcggtgacgagcggctcgtggagcttttcagcgggccgagaggggcaaaagtgaacggctggctgctccacattcccgctgcttatttgggcatcgctcaagcggcaagggactatgccgtccggtttgcatccgaatattcgccgaacagcctgaacggtccgattaaagacgtgccggccgttcagcagcgtgtcggggagatggagctggaattgttaaaagcgagacagtttctcttcacggcggcgcaaatgtatgatgacccaaaacgccgtccgtttataaaaagcgagctcggcgcggcaaaacacattgtgacgaatgccgccctttctattgttgataaagcgatgagaatcaccggcgcgaaaagcctggaacgaaataatccgcttcagcggtattaccgggatgcccgggcgggacttcacaacccgccgatggatgatgcggtcatcggcaaattagcggcggaagcatttgagcaataaaaaaagagcctgaaaaaggctctttttatgtatggctgttgtgctgaagccgtttttgatgcttacggtcaattctgtcatagatcacattcatcagcttttgattattcatgatggcggccttgttttcttttatcagctgttcgtaagtttttattttacgtttcggcatgagtccgcaccttccttacatatttgatattcgctttctagctctccaagcgataattcgtataaatgccgttccgactttttgtatattccgttattaatcagcaaatggatcagatgtttttttcgtccttcaactgatgatctgagttgaggagaagatctcatgattaccctcctatcaaatgatattgataatcattatcagttaatgaaagtatacaatgtgaatattcatatgtaaaggaaaaataccgccaatttttcgacaaaaagtttcccggggaataatgctgtcgaattgattgcatttccggcagatcaaaactgctatttttctgcttttccatccatactatgaatgagaatggaggcgtcttatatgaatgatcaaacggcaaacttaaaacggggcgaaaaaggcgcgcttctcaatatcgctgcgtacctcatccttgccgccgtgaaactggtgatcggtcttgtttatcattccgaagcgctcagagcggacgggttaaataatgctacggatattgtcgcatcactggctgtgctgatcgggctccggatttcccagcgccccgcggacagcgatcatgcctacggacattatagggctgaaacaatttcttcattaattgcgtcttttattatgatggcggtcggtattgaagtgctgatcggaggagcgaaggcggtcgtgagcggtacggagaccgagccgagcttcattgcggcttggacggcgctcggaagcgcgattgtaatgtacggcatgtatgtatacaacagccgtctggcggatcggatcaaaagttcggcgcttcatgcggcggcgaaagacagccgttctgacgcttatgtcagtattggggcgttcataggcgtcgtaacggcccggtttcatctgccgtggattgatccggtcattgcttttctgatcgggatcatcatctgcaagacggcatgggacatcttcaaagatgcttcccactcattgacggacgggtttgacctgaaagatttggagccgtacaaacatacggtgaaagaaataaaagaagtcagcaggctgaaggatgtgaaagcaaggtatttggggagcacggttcatgtggaaatggtcattacggtagatccgggactgtctgtgaaggaaggccatgaagtagctgatgaggtcgaatatgcaataaaacatgaacatgatgttactcatgtccatgtccatgtagagcctgaagtcataaacaaagatcgcggaacgaattaaatatgctgtgataaaaactcagtgacttcttcgggagttttagcgtttgcgctgtgaagatgcgctttcttttctccgtttttaaagatcagaaggctcggaatgcccatcacctgatatttgtcggcaagctcagggagctcatctctgttcaattcataccaatcattttgattatattcttccaaaatatcgccgatgaacatattcatgcgcgtgcagtcagggcaccagtcagcgaaaaacttcacgatgatttccttgtcggattgaataagttcattaaattgttctgttgtactgatttttttcatatgacacatctccttttccatgccattttaatataaaataaaaaggaattacatacaaatgctttcatatgcagaatgcccaaaaataattagatcattttctgaggaaaatgataagatagtaaagatgaattgttgtggggggaatatccattgaaaacaagtctaggattggtgtacggcggaaagtcagctgaacacaatgtatcgcttcagacagcacttgctgtaacaaaagcgcttaatactgataagtttgatatacatccgatttacatcacggaaaaaggagaatggcaaagaggtccgcttctgactgaaccggtttccaacgtgaaaatgctgcagctggaacaaaatggtgaaagtttcgctctttccgcattgaaccgggaaatgtttcctgaagcgtcggctgatgaaaaggcgccgattgacgtcgttttcccgcttctccacggaccgaacggtgaggacggcacgatccagggccttcttgaattgctgaacgttccttatgtcggcaacggagtgcttgcgtcatcagcgggcatggataaagtcatcatgaagcatttgttcgctcaagcggggcttccgcaggcgaagtacgccgctttcttaaaaaaggattggaaacagactccggacagctgcttacagcaggttgaagaggaactggggtatccatgctttgtcaaaccggcgaacctcggttcaagtgtcggaatcagcaaatgccgaaaccgcgaagagcttgaaaaagcctttgaactggcttttgagtatgaccggaaaattgttgtcgaagaaggaatcgccggcagagaaattgaaatcggcgtgctcggaaatgacgaaccgaaatgctccgccgtcggtgaaatcgcgccaaaaaccgatttttacgactacaaagcgaaatacgaagacggcgacacggatttaatgattcccgcgcaagtgacggatgaacaatacgcggaaatcagcgagatggcgattaaagccttcaaagcgattgacggctcaggccttgtccgcgccgatttcttcctgaccaatgacggtcaagtgctcattaacgaagtgaacacaatgccgggctttacgccattcagcatgttcccgctgctatggaaagaagccggcgtagattacagtgatctgattgaacagcttgttgagctggcaaaagagcgccatgccgagaaacagctgattaaacatacattttaatgaagactgacactgcctgtaggggcagtgtcttttcccgtaacagacaacattttttagaaagcgaggtgccacctttgataaagcgaactgtaaaacgaatcgccgacatggtcaaaggcacactgacaaatcccgtatttgaacaaacaatgatagagggcgccgcaaccgatacgcggactttggaaaaaaatcagctgttcatccctttaaaaggcgagcattttaacggccacacctttgtgccgcaagccttcgaaaaaggcgtttccgccgtattgtgggaccgctccgaaccaaatccgccgaaagagcgtgctgtcatccttgtcgatgatacgctggaggcgctgcaaaaattggcaaaagcttatttagaagagctcggcacacgggtcatcggggtgaccggaagcaacggaaaaacgacaacaaaagacatgcttcacgctgtcctcggcactcaataccgcgttcacaaaactgccggcaattttaacaaccatatcggcctgccgctgaccgtgcttgccatgcctgaggatacggaaattgccgttttagaaatgggaatgagcgcgagaggcgaaattgattttctgagccgccttgctgaaccggaagcggccgtcattaccaatatcggcgaatcccacatgcaggatttaggctcaagagaaggaattgcagaggcgaaacttgaaattataaacggacttcgggaagacggagtgctgttttatttcggggatgagccgctgctgcgcgagaaggcgtacacttgccggacaacgacatacggcgaaggtgcggacaatgatctccgcttgaaagaaataaagcaggcagaagaaggcacatatttcactatcgacggtattgatcgttctttctttattcccgttctcggccggcataatgtgatgaacgccatgggcgcatacgccgccggcatctatttcggcattacgccggaaaatgcagctctgggactgagccgcctgaaggtgacgggaatgagattggaactggtcaaaacggaaaacggcatctcaatcgtaaacgacgcctataatgcgagcccgacgtcaatgaaagcggcgatcgaattaattgaaacgatgaaaggctatcgaaagaaaatgcttgttctcggtgatatgcttgaactcggtgatgaagaaaaagcattccacgaagaatgcggggccgcgatcaatccggcggaaatcgaccatgtgtttacttacggcactctcggcgcattcattgctgacggagcacgcaaacattttgaagagggccgcgtcagccattatcttgataaaaaagaactgcttgaggctatccgggaaaatgccgcttcaggcgatctccttctgtttaaagcatcaagaggtatgaagcttgaagaaaccgttaaagatttattagagaagaactgaagaaatactgatcagcatcataaaaatccgcaaaaatgaagaaactaattcagggtgaaataattctgtccgtatgaaaaagaattaccgacggctggaaaatcccgcccggagcgggggccggcgtcatttgcgggaagaatccggtcaggccgcttccggccgcctgaccatctcgccttattgaaaaacacatagtgtaatggtaagattaaacgtaaagtaattcgggctttgtatacgtatgatcctgtcctttacatggaagggcagtttttagtggtaaatcacgacattactgaaacagcaatcagaaggagtttgaataatttgactataacgtttcaagatttccaattaagttctgatctcatgaaatcaatcaatcgtatgggatttgaagaagcaacaccgattcaggcacaaacgattccgctcggacttttaaataaagatgtcatcggacaagcgcaaacaggtacaggtaaaacagctgcgttcggtataccccttgttgaaaaaatgaaccccgagtctcctaatattcaagcaatcgtaatcgcgccaacccgtgaattagccattcaagtatctgaagagttatataaaatcggacaagataagcgtgcgaaagtgctgcctatttacggcggtcaggatatcggacgtcaaatccgcgcattgaagaaaaacccgcatatcatcgtaggtacgccgggacgtcttcttgaccatatcaaccgccgcacgatccgtttaaacaacgtgaacacggttgtcatggatgaggcagatgaaatgctgaacatgggattcattgatgatatcgaatctattctctcaaacgtgccgagcgagcaccaaacgctcttattctcagcaacaatgcctgcgccgatcaaacggatcgcagagcgtttcatgactgagccggagcacgtaaaagtaaaagcgaaagaaatgactgtatcaaacatccagcagttctacttggaagtgcaagaacgcaaaaaattcgacacgctgactcgtcttcttgacattcagtctccggaacttgcgatcgtattcggccgtacaaaacgccgtgttgacgaattagcggaagctctgaaccttcgcggatatgcggctgaaggaattcacggcgacttaacgcaggcgaagcgtatggtagcgctccgcaagtttaaagaaggtgcgatcgaagtgcttgtagcgactgacgttgctgcccgcggacttgatatctcaggcgttacccacgtgtacaactttgacgtgcctcaagatcctgaaagctacgttcaccgtatcggaagaacgggccgcgcaggaaaaacgggtatggcgatgacgtttatcacaccgcgtgagaaaagcatgcttcgcgcgattgaacagacgacaaaacgcaaaatggaccgcatgaaagagccgacgcttgacgaagcattagaaggacagcagcaggtgacggttgaccgtctgcgcacgacgatcagcgaaaacaacctgaacttctacatgacggcagctgcggaactgttagaagatcatgatgcagtgacagttgtggctgcagccattaaaatggcgactaaagagccggacagcacgcctgtacgcctcactgatgaagcgccgatggtcagcaaacgctataaaaaccagcgtacttctaagcgcagagacggccaaggcggcggctaccgcggcggtaaagggaaaagcagcaaccgttcttcctacgataaaaaacgttcaaacgaccgccgttcttcaggtgacagacgccagaaaaaatcatactaagacacagaaagcggacccttctatggggtccgctttttttcgatatgccggaaagtgaatcttttttgcaaatcagccgtatttgtatgtatgataaaaaatgggaggtaggtatattgagagcacagccaaaaaatcgaatcagtccaagcggcttaaaagtctggcgtcttcaggaagtcatcttgtccgccgtttgtcttctagcggtcataacagcagctgttttaagccatttcttccattggccgtattggatcacgggagtcctcggcatcatttggattatcgggtcagtgatatccatctatgccataccgaaaatcaggcacaggatatggcgttatgaagtccatgaaaatgaaattgatattcaatccggcatttttattgtcaaacgggtcattgtgccgatggtgagggtgcagcacgtagacacttcacaaggcccgctcctcagaaaataccagctggcctcagtcaaaatctccacggcggcaaccgttcattccattccggcgcttgatatggaggaagctgaccggctgagggattccatttcccgtctggcaagggtgacggaagatgatgtctgaaccgaaacgtctgcacccggcggccgtgattttgaacttattccatattattatcgaaaccattaaaaacattattcttcctttttttctcgtctatatcgtcaattccaaccatttcatccgcttttatggcggcattgcgctcgccgttctgctgatctggctgattacggcaagtgtgatcgagtggaggaagttcacgtatcggattgaagacggagaattcaggattgaagaaggcttattttttacgaaaaaaagatacatctccattgaccggattcaatcaatgaatacgagtgccggcgtcgttcagcagctttttaagcttgtgaagctgcaaattgaaacggccggcgacgggaaaaatgccgaggccgtcttatccgccattacggtggacgaggcggaacggatcagagcggctgtttttcagcaaaaagccgagcaagaagagcaccgggaaactgcagcggagcaggagcccgtgcgtgaggatgatgtgcaatccgtctaccgcctgtctttaggtgagctgctcatggccgcctcaacatccggaggaatcggtgtcatcatctcagcggtattcgccctcatttctcagattgatgaagtatttccgatggactggctctatgacagattttcttttctcaagcatgcgagcatcagcatttacgccgtgatcattttcgtgggtttgttcatcgcctggctgttaagcatcgccggtatgatgatcaagcatgcgaactttaaaatagagaaaaaggaacatgaattggtcattaccagaggaattattgaaaagcatcaagtgacgatgccgctccgtaaaatccaagccatcaaaattaaagaaaatgtcatcagacagttattcggctacgcgacggttgcgattgtcagcgccggcagtgcggggaatgagaaagaaggagctcagacgattctgtttccgatcatccgcaaatcaaggctcggtgtgatgctcaaggatttcaccccggattacgtgctggacgaaaatcggcatcatttgccgaagagatcgctgcgccgatatttattccgctccgtaatcttctcggttttcgtgatcattccgctttgtattctgtttaaaccgtggggatatgcatcgcttcttgtgcttcccgccgaactggtgctgggctatgcctcgtttaggagtgcgtcatggtgcttaaacggcggccggctgcagatcaccacgaggctgatcgggaagacgaccacgattatgctgagaagaagaatgcagatgttcgaagtcagccgatcctttctgcaaaaaagaagacggctcgcatccgtggctacagcggtgaaatcagctcaccatatggagcatgtcatgctgagggatgtcagcgaggaagatgccgaacgcatcgggcgatggtattcatatgaaaaagcggacggttaataccgccgctttttttgctgcacgcataaaaaagaaagcaaaaatccgcctgccagtccgaacaaatgcgccataatgttaatattagaattgataaacgtcgacagtaccgcaatgacaagcagggtcataatcattttcgactggtcccggccgatcagctccttgcggaaaacagtcagaaacacatacacgccgaaaagtccgaagatcgcccctgatgcgccgacatgcacataatcaagcggttcgacaagatacgtgccgatattgccgatgatgcctgatgcgatgtacacaatcagaaagcggacttttccgagcatttgctcaagcgggggcgcgaataaaaagagagacatggagttaaacagaaggtgggtgaaattcgcgtgtaaaaacatcggtgtcaccagccgccaccattctccttcggcaacgccgtaattatagccggtcactgcatctgaccacatcatgacggaatgaagcggcaggctgaaaaacagccacaagaacgcctgcagcgccaaaatacagctgacggccggataacgtctgataaaagtctggaaattttccgttcgtataaacatcgcaagcccctttgcatctgatttgttacatatatagtaacacgtttatgacataaaccgttttttagtacggacttttaggaggaattcacatgattttcggaatcggaatcgacatcgttgaactgcacagaattgaaaacatgctcagccggcagacgaggtttccgcaaagaatattgacggaggctgaatacgcccgttttacacagctgtcagacaaaaggaaaattgaatttctcgcgggaaggtttgcggcaaaagaagccttttcgaaagcatacggcacaggtatcggcaaagagctcagttttcaggatattgaaatcgggaaggacccggcgggaaagcctgtgctgacctgtgccaagctggacggcgcggcacttcacgtctccattacccatacaaaagaatacgctgcggcgcaggtcgtgattgaaaggttgtcacgctagtctgcatattagccgaaaccccttcatatatttgatagtgcattaagggagacaagttgtttgaggcttttatggtacgcgtccggccgttcagggcgtaccgttaaagtcaaacaagcgatttcttccctttacatcaattgagaagaaggggttgaaaaaaggtgagaaaaagctttgttttgcttttaacgggactgcttgccgtccttattctttcggcctgcggccaaaaatcacaggaagatattgtgaacggtttagataagaaggcgaaagaatacacctcgtacaaggcgaaagccaaaatgaccattcaaacggggagtgatccgcaagtatacaatgtggaaatctggcataaaaaaccttccctgtaccgggtctatctggaaaatccgaaaaaagaccaaaaccaagtcattttacggaacgctaacggagtatttgtcctcacgccgtctttaaataagagcttcagattccaaagcgactggccgaataacagcagtcaagtatatttgttcgagtcacttgtaaaagatgtgcaaagtgacaaagacgccgtctattccgccaaggataaaaagtacacttttgaaacgaaaacaaactatcagcacaacaaaatgctgccgacgcaagaaatcactttcaacaaaaaggacatgagcccgtcgctcgtcaaagtcatggatacagaccggaaagtgatggtgaaagtcgaattcaaaagctttgaattcaacaaaccgtttgacaaagattcttttgacgagaagaaaaatatgacgctctcccagatggacgtcgccacaagcgccaagccgtctgattcatttgcggtaaaaactccgcttcaattgccggccggcgtcaaaaagcttgaagaaaaagatatttcaacagcggacggcaaacggatcgtcatgacatacggcggggaaaaatcattcacgctcattcaagaaaaagcccaaatcgcaaaagccgcctctgccgtcacgctgaacggcgaaccggttaatctcggcttcacggtcgccgcgctgtctgatacgtctttaacgtggacatatgacggagtcgattacctcctgtcatcgaaggatcttaccaaagatgaaatggtggcagccgccaaaagcatgcagggacagtcatcaaaataacgtcaaaaaagaggccgccgctgtcggtctctttctttttttgatttcactttgcagaataattttagtatgataataacaatatggattgaaaataatgctaggaagtgtatcgagtgaacacagcatccttttacagagatacgtgggcggaaatcaacctgtctgcgattaaagaaaatattacacatatgaaaaaacacatcggcgaaaacgtccatctcatggcggttgtaaaggcgaacgcgtatggccacggagatttggaagtcgggaaagccgcgcttgaagcgggtgcctcttgtcttgccgttgccatactggatgaagcgatctcattgagaaaacgtggcattacagcgccgattctcgtgcttggcgccgtgccgcccgaatatgtacaagcagctgccgaatatgacgtaacactgacggggtattctgttgaatggcttcaggaagctgcacgccacctcggaagtgaaacagtgccgtttcacctgaaagtcgataccggcatgaacagactcggggtcaaaacggaggaagaaatccaaagcgtattaaaaatcctcagccaaaacccgggtttagtctgtaaaggcgtttttacccattttgctaccgcggatgaaaaaaacagggattatttccttttccaatttgagcgctttaaaaaattgattgctccgcttccgttaaaggaattgatggtgcattgcgcgaacagcgctgccggccttcgtcttaaaaaaggcttctttaacgcggttcgtttcggcatcagtatgtacgggcttcgtccttctgccgacattcaaaatgaaattccatttcaattaaagccggcttttacgctgcactctgttttatcccatgtgaaaaagatccgcaaaggggaaagcgtcagctacggcgcaacatatacggcagagaaggatcaatggatcgggaccgttcccatcggctatgcagacggctggctccgcaagctgagcggtacggccgtgctgatcgacggcaaacggatgaatattgctggaagaatctgcatggaccaattgatggtagaactggaccaatcttatccgccgggcaccaaagtcaccctgatcggcagccagaaggaagaaacgatcacgatggacgaaatcgccgggcggcttgagacgattaattacgagatcccttgtacgattagttcccgcgttccccgtatgtttttggaaaatgagagtataatggaagtaagaaatcctttactgcaagaaaatacaagtaagtaaccgtcatccggaaaaagagaatttataaaacagctttgcttgacgtttgaataatggtatcattatgtctggatggataattggtcgtatccgtaagtttggtggaggtgtatgttttttgtctgaatccagcgcaagaaccgaaatgaaaatcagcttgcctgaaaacttagtagctgaattggatggtgtagcgatgcgggagaaacgaagcagaaacgaactgatatcacaggcagtgagagcgtatgtcagcgaacggacaactcgccataaccgtgatttgatgagacgcgggtatatggaaatggcgaaaatcaacttgaatatttcttctgaggctcactatgctgagtgcgaagcagaaacgacggttgagcgcttagtcagcggaggataatcattttgattgtaaagcgcggcgatgtttattttgctgatttatctcctgttgttggctcagagcaaggcggcgtacgcccggttttagtgatccaaaatgatatcggaaatcgctttagcccaactgctattgttgcagccataacagcccaaatacagaaagcgaaattaccaacccacgtcgaaattgatgcaaaacgctacggttttgaaagagattccgttattttgctggagcaaattcggacgattgacaagcaaagattaacggataaaataactcatctggatgatgaaatgatggataaggttgatgaagccctgcaaatcagtttggcactcattgatttttagtcatatttttctagttgctcatatagagcaactttttttgttttcgaaaaacattagcgctataataaagagataatcaaacaaaatatgttgttttgtgtcgggaggtcagcgaaacccatgtcgaatcagaaagtgtatcagttcattattgatcagcatgatgaactgcttgatacttggacagccaaattaaaagaagtaggcaatcaggaagattatcagcttacgtatcacatatccgaaaatatctgcaaagactatatagacattcttttattatcgacaaaagatgacgaggctgcggaagagcagatcagccagctcgcactgcgcgccgttcagctcggcctgtcattgaagcttctttcagtcaccctgtcagagttttggaagctgctttacgaaacgatggttgaccatgagatggccgatcatgacagagcagaactgatcttggaaatagacagctttttcagcccgatcaacacggaaattttaaatcagtattccatctcttgggaaaaaacagtttctctgcaaaaaatcgcgctgcaggaactgtcggctccgctgatcccggtatttgagcatgtaaccgtcatgccgcttgtcgggacgattgatacggagcgtgcgaaacaaatcatggaaaatctgttaaacggcgtcgtaaagcaccgttcacaagttgtcttaattgacattacgggcgtgccggtcgttgatacgatggtggcgcaccacattatccaagcatcagaagcggtgcggcttgtcggcgcgaaatgcctgctcgtcggaatccgtccggaaatcgcgcagacgatcgttaacctgggaattgatttgtcgcaggttattacgaagaatacccttcaaaaaggaattcaaacagcgcttgaaatgacaaatcgaaaaatcgtttcattgggggaataacattgtgagacatccaaaaatcccgattctgaaactgtataactgcttattggtatccatccaatgggagcttgacgaccagactgctctgcattttcaagaagacctgctgaacaaaatctatgaaactggcgcaaacggggtcgtcattgacctgacatccgtcgacatgatcgattcatttattgcgaaagtgcttggcgatgtcattaccatgtcaaaattgatgggcgcaaaggtcgtattgacaggaattcagccagctgtagcggtcacattgattgaacttggaatctcacttgaggaaatcgaaacggcgctcgacttagagcaggggcttgagacattgaagcgggaattgggggaatagcgatgaacgaccaatcctgtgtgaaaatcatgacagaatgggatatcgtagccgccagacagcttggccgcaacgttgcgaaggaattaggcttcggcacggtggatcaggccagaatcacgacggctatctcagaattggccagaaatatctacttatatgccggcaaaggccaggtcagcatagaacaagtaaacgacagaggaaaaaaaggccttaaaatcatagcagaagacaaaggacccggaatcgcggacatccgtaaagtgatggaagacggcttttcaacgtcaggcggattgggagcgggccttccgggcgtgaaaaggctgatggacgaattcagcctgcaatctgttgcggaggaaggaacagagattcaagccgtgaaatggcttcggtaggaggttagaacgtggatttcagggaggttatagagcagcggtaccatcagctgcttagccgttatatagccgaattaacagaaacatctttatatcaagcacaaaaattcagccgaaaaacgattgaacatcaagttcccccggaggaaattatcagcatccaccggaaagtagtaaaagaactttatccggatctgccggaagatgtttttcattcgctggattttttaatagaagtcatgattggttacgggatggcttatcaggagcaccaaagtctgagagatatccagcaggagattcgttcagaaattgaaattgccgcaaatgttcagcagacgctgctcggcacaaaaattcctgaggaagaagagctggatatcggggcgatcagcgttcccgccaaacagatgagcggggactattatcactttgtcaaagacaaggaatcgattaacatcgcgatagccgatgtcattggaaaaggaatacccgccgcattgtgcatgtcgatgattaagtatgccatggactctcttccggagatcggcattcacccctcccaagtgctgaaaaatcttaaccgcgttgtagaacagaacgtggattcaagcatgtttatcaccatgttttacgcaaactacaatatgaaaagccaccaatttacctatgcttctgcggggcatgaaccgggcttctactactctgaaaaagaaaaaaagtttaatgacctggaggcaaaaggattggtgctcggaatttctcaggattttgattacagccaatatgaacagcacctggacgaaggagacatgatcgttcttttttctgacggcgtcaccgaatgccgtaccgaaaacggtttcctggagcgcggcgacattcagcgcatgctggaagaacatatggactgctccgcgcaggatatggtcaaaaatatttacgacagcctgctgagactccaggattttcagcttcatgacgattttacgttaattgttctgaaaagaaaggtttagaaaaacggcagcacgggtaaaaagccattagcacgagtaaggataactttcagaggtgatacgatgaatttaacagtagatatgaaggaaaatctttcagatatacaaatcaatatcgccggagaaattgatgtatactcagctccggtggttcgtgaaaagctgatgcccctggctaacgaggggaaaaacatgagaatctgcttaaaagatgtgaactatatggacagtacgggtttaggcatttttgtaggcgtgtttaaaacggtgagcaaggaaggcggttctttgaagcttgagaatctttccgaaaggctcgtccgtctgtttgaaattacggggcttaaggacatcatcgatatttcggcaaagtcagaaggtggcgtgcaatgagtacatcagttgattatatagagatgaaaattccggccgaaccggaatatgtaggaatcgtcaggcttacgttatcaggtgtggccagcagaatgggctatacctatgatgacattgaagatttgaaaatcgctgtcagtgaagcttgtacaaacgctgtccagcatgcatacaaagatgagaataagggagaagtatccgtgcggttcggtgtgtttgaggatcggctggaggtcattgtcgccgatcagggagacagctttgattttgatcaaaagcagcaggatctcgggccgtacacaccttcgcacacagtcgatcaattgtcagaaggagggctcggtctatatttaatggaaacgctcatggatgaagtcaaagttcaaagcaactctggcgtaaccgttgcgatgacaaagtatttaaatggggagcgagttgatcatggcacaaccatcaaaaactacgaaactaactaaagatgaagttgatcggctcatactcgactttcaaatacatgataataaagaagcccaggaaacacttgtcgaggtgtataccaatctcgtcgaaatgctggcaaagaaatattcaaaaggaaaaagctttcacgaagatctccgccaggtcgggatgatcgggcttctcggtgccattaaacggtatgatcccgaggtcggcaaatcctttgaagcatttgcaatcccgaccatcattggtgagatcaaacgcttcctcagagataaaacatggagcgtacatgttccgagacggattaaagaactcggcccccgcataaaaatggcggtggatcagctgacgacagagacacagcggtcgccgaaagtcgaagaaatcgcggcctttctcgatgtatcagaagaggaagtgctggaaacgatggagatgggaaaaagctatcaggcgctgtctgtcgatcacagcatcgaagcggatgcggacggaagcaccgtcacgattcttgatatcgtcggttcgcaggaggaaggatacgaacgcgtcaaccagcagatgatgatcaaaagcgtgcttcatgtgctgtccgaccgcgaaaaacaaattatcgatctaacttttgtgcaaaataaaagccaaaaagaaacaggggacattctcggaatatctcaaatgcacgtctcgcgcctgcagcggaaagcggtgaaaaaactgagagaggccttgattggagatccctccatggagctaatgtaatgattcaggttgaagaaaatgaacatgtgcaaactcttgtataccaattaaataaagaaggcaagtccatatgcggcgacagcttttttataaaggcgaatgaagaggaattagtctgcgcggtagcggacggtctcggcagcggatctcttgccaacgaatcttcgtcagccattaaagacatcgtaaagacgtatgcagatgaggatgtggaaagcatcattgagcgctgcaatcaagcgatgagaaacaaaagaggggcgactgcctccatcttaaaattcaatttcaccaaaagggaactgacatactgttcgatcgggaacgtccgtttctttctgcattccccatcaggcgaagtctttcatccgctgccgatttcgggctacctttcaggcaaaccgcagaagtacaaaacgtatacctcatcatatgaaaaaggggcaacattcatcatctatacagatgggctggaggttccgcatatccgcacctgcttaaagcagggacactcaatagaagatatatcaaaatcacttcatccgtacacaacatccagacgtgatgatttgacctatattctcgggcagcttttatcgtaaggctgctttttttatgttccgccgttttttgatacactagagaaagaatgaagagatggaggcttttgtgatatggaaacgttagcccttttgaaaaaacaaattgctgaagaaacagctttatcccaaaaaaatgtcgaaagtgtcatccgcctgcttgaagacggcaataccgttccgtttattgcgcggtaccgaaaagaacagacaggctcaatggacgaggtgcagattcaggcaatctccgagcggtggcaatacatacaaaacctgacgcagcggaaagaagaagtcatcagattgatcgccgaacaggacaagctgacggacggactgaaacaaaaaatcgaacaagcggccaaacttcaggaagtcgaggatttataccgtcccttcaaacaaaaacggaaaacaaaagcgaccgtcgccaaaagcaaagggcttgagccgcttgcggactatattctttctctcccgaaagaaaaccggctccatgaaatcgctgatcaatatatcagtgaagagaaagaagtcgctacaagagaagaagccattgaaggcgcgaagcacatcatagccgaacaaatctcggatgatcctcattttagaaagtggatccgccaggaaacgtataaaaaaggaattctcacatccacggcaggcaagtcagccgcagatgacgagaaaaacgtctatgaaatgtattatgaatacgaagagccgatccaaaaagtcgttcctcacagagtgcttgcgatgaaccgcggtgaaaaagaaggcattttaaagattgcgatcgaaccgcccgccgatcagttgaaagcttatttagaaaagcaaatcatcaaacatcgtgaaacgcctgtgaaagaaacgctgaaagaagccattgaggacgggtacaaacgcctgatccagccggctattgagcgtgacatccgcaaagagctgtcagaaaaagcagacgcgcaggcgatccatattttcgctgaaaacctgcgtaagctcctgctgcagccgccgatgaaggggaaagtcgtgctcggcgtcgatccggctttccgtacgggatgcaaactggcagtcgttgacgagacgggaaaagtgctgaaaatcgacgttatttatccgcacgctcccgtcaaaaagacagccgaagcccagaaaaaaatcaaacaattgctgaaccgttacgaagtcgaggtcgtggcgatcggaaacggcacggcatcaagagagacagagcaattcatcgttgatgtgttaaaagaaacagagcgggacatctattatgttatcgtcaatgaggcaggggcaagcgtgtactctgcgtcagaaatcgcccgtgaggaatttccggattttcaggtcgaagagcggagcgccgtctccatcgcgcggagattgcaggacccgctggccgaacttgtgaaaattgatcctaaatccgtcggcgtcgggcaataccagcatgatgtcagccaaaagcacttaaacgaatctctccgttttgtcgtagagaccgtcgtcaaccaagtcggggtaaatgtcaatacagcatcagcagcgctgcttcaatatgtagccgggttatccaaaaccgttgccggcaacatcgtcaaaaaaagggaagaactcggcaaattcacaaatcgcaaagagctgaaagaaatcccgcgcctcggtgcaaaaacatatgaacaatgcatcggctttttgagagtgcccgaaggacaggaaccgctcgaccgcaccgggatacacccggaaagctataaagagacaaaggcgctgctcaaaaaacttcatctcacagcagatcagatcggaagcgcagacgtaaaagagaaaatcagcgcacttccgctgtctgaaacggcagaagagctaggaataggggacattacgcttgcggatatttgcgggcagctgacaaggccggagcgcgatcctcgtgacgaagtgccgaaacctttgctgaaaaaagacgttctgcagcttgaggatttaaaggaaggaatggaattgcagggcaccgtccgcaacgtcgtagacttcggcgctttcgtcgatatcggcgtcaagcaagacgggcttgtgcacatctcaaaactgagcaatcaattcgtcaaacatcctcttgacgtcgtatcggtcggagacatcgtcaccgtatgggtcgaaggggtggacgtgcaaaaaggcagagtgtcgctgtctatggtaaaataaaagcactgcttacgagcagtgtttttttctgtagaagtaccagcactggttcagcagtttgatttggtaattgtccttttctaaaaacgctttttgcatttgtttcatcagccaattcggcatggctcattcctcctcagcttttagttagagggcggttttaacacattgtatgcgaacggtgaattgtcccgttcaatgtttttaaagcggggtgcacttatggataacgaacaacttcaaaagctgacggaagacatctctgcacaagatttcggaaagccgttccgccaccgggcctttttcaatgaccggctgaaaacgacaggaggccggtacatgctgtcttcccataacatcgaattaaaccgcaaatatctgctcgaacacggccagagtgagctcgaaggcatcattaaacacgagctgtgccattatcaccttcatcttgaaggaaaagggtacaagcacagagacaaagacttcagagagctgcttcagaaagtcggcgcgccgagattctgcacgccgctgcaaacaaaaaagacagaaaagaaaacatatatgtatagatgcacggcttgcggccaacagtatataaagaaacgggcaatgaatccggaaagatatgcctgcggaaagtgcagaggaaaaatcaaaagaattttttaaaaaggcttgactcatttcggtgatctatgttaaattataaaagtcgttgagagacagcgatactttctcaaaaaaataaatgttgcttcttgacacaatatgtcgcatcatttataatgaagaaagtctgatcattccacagtagctcagtggtagagctatcggctgttaaccgatcggtcgcaggttcgaatcctgcctgtggagccattatggagaagtactcaagtggctgaagaggcgcccctgctaagggtgtaggtcgcgtaagcggcgcgagggttcaaatccctccttctccgccagataagttctcaaccagacggcccgttggtcaagcggttaagacaccgccctttcacggcggtaacacgggttcgaatcccgtacgggtcaccatttaccttcgttgggctatagccaagcggtaaggcaacggactttgactccgtcatgcgttggttcgaatccagctagcccagccattttattttaaaatttttaatcacttttagagcgagccattagctcagttggtagagcatctgacttttaatcagagggtcgaaggttcgagtccttcatggctcaccacttgtcacgcgggtgtggcggaattggcagacgcgctagacttaggatctagtgtcttacgacgtgggggttcgagtcccttcacccgcactttattttcaaagtgctgatcatgattcactagcttacatgcttagtggaaagacagcttcatagcacgcggtcgtggcggaatggcagacgcgctaggttgagggcctagtgggtgaataacccgtggaggttcaagtcctctcggccgcatcaatgataccaaggattatagagatccttggtatttttttgtgcttatttttaaatgatctgctgcccgtaaactggcacttacctaaagtaagttccgttattcccacgtgaatatatttgcgataaggtattgaatcaatatacgatccactcaattatttgagtggatctgtttgttttttatttatttgcagcagtctctatgtgacgaaacaatagattcattaaaaccctttacgcagccaggttgtggcaagatcaattgctccgcgcgcggcttcagttttagctaaggcgttgagcatcacgaagtcgtgaatgataccttggaaacgtacggcagtgaccggaacaccagcttcacgaagtttattggcatatgcttctccctcgtcacgaagtacatcagcttcagctgtgataatcaatgcaggtggaagcccttgaagttgctcagtagttgcacgcagaggtgatgctgtaatctcagcacgctcgttcgaattggttgtgtactgatcccaaaaccacatcatcgcgtccttgcgtaaaaagtatcctgtagcaaactggtgataggattccgtatcgaaagaagcgtctgttaccggatagaaaagtaattgttgtcggatattcaagtcacctcgtgctttggccattagcgtgacagcagcagtcatattgcctccaacactatcacctgcaattgttagactctctggattcatgccgttctcacggccattttcagctgcccacttcactactgcatagatttcttcaatggctgtgggatattttgcttctggagataaggtgtaatttggaaagacaatagcagcttgtgctccaactgctagttcacggatgagccgatcatgtgtatgctcattaccaaatacccagccggccccatgaatgtacacaatgacaggaaggtgcgcaggcgcattctgtgggcgcattattcttactgacacctgtccgctcggtcctcctgaaatcataatatcttcaatatcaactggcagtttatcaattgggtcagattgaacctcatctacagcttctcgtcctttctcaggtccaaggtcgaatagataaggtgggttcgcggttgcttctgcaaattcttgagctgctttttctaattgtacttttttcaacatagatctctctccttatttgaaggttggtcacctatatgttttaatcaaatttttttattctattacctattgatcttggcatctttcgtcttacattgctgttgtaatgatttgtacatcaatatttccgcgagtagctttagaatatggacatacctgatgagctgcatgtgttaattcttctgcttgctcttgagataccccttgaatttccacctccaaaacaactccgattttataaccattatcactttcatcttttaataaacttactttaccagtaacagctgattcgatttttaatcgttgtctttgggctgctaaatgaagagcactgtcataacaagctgaatagcctgccgcaaataattgttctggatttgtagcagtggatacttgatttggttttggcatagctaaatccaaatcaataataagatcattagattttacatgaccttctcttccaccttttgttgtagcttctgctgtaaaatatactgtcatcatcaaacactcctataaattaaatttaacacaattgaattttaaacaattaaattaaggttgtcaattaaatttttaaaaattgaattgttcacaatataaattcgcgattaaaatccttgataggagatcatattattggtgatagattttttgtgattttgtataaattatgattaattaaattgttagtaattcaattttacttaatgtaattcttgtgctattatgtgtaataatgaatataaatattgtgagggatataacatgaagaatgataaattactgttaagtaatcatctatgttttgcgatttacgcagcttcccgtgaaatgataaagttataccatcctctcttaaaagaattaggaattacttatccacagtatttggttcttcttgttttatgggagaaggaaaaaatatctgttaaaggtttaggcgaagaattatatctggactccggaacattaactccagttttaaaacgacttgaggagcgaggtcttattataagagagcgttcaaaagaggatgagcgaagtgtaattattacgttaacaactgaagggaacgagtttaaagaaaaagtcacattgattcctaatgcagtatttgataaaaccggttgtaatgaagaagaaattaaaagttataacaaggaaattcgtaatttacttaacatgctgacaactgagcaatagttttatgaatatagatggttttgctattatgaagtctaaagtgcttagtttaagggccctgcgggtgaataacccgtggaggttcaagtcctctcggccgcatcaatgataccaagggttttgacgcccttggtatttttttgtttatagaaatttatctgttactgcccacttacttataggcgtaagctctcacgtttcctggatgtcaaataacaataatgatatgcaaggttggtattatgtcacggtggatggtcaagtgcaaacataaaaagcccaaagatgggctttttttatttcattgattgtgctaactgaaccatttcagtatcctttaagttagagctatccatttctacataggttccgttttgtacccatcttaaaatgccgccttttgttccatcagcccatctttcaaatatacctttctgtccattaatagtaacgtttttaacgttttttccatctgaataacgtaacggttgatttttaaatttgctttgtgcaatttcgaccatcacatagtttctgtaagcatggtcttcataattaagtcttgtcatgcttatttttttgtcttgatttagataattttttatggttaatttccaatttgaagaagtgtctttaggtactaaaacatgaaaatctgcatgttcttttaaataagataaatcttttcttgaaaaattttctacagcgaagtctgaagttgcagtaactttgagatttgaccaaggatttaaaagaaaaacaagtgaaagtgatattccaatcagagaatatttcattttaattgctccttttctgttaataagcaacttaaggacagtatccctattttgatatgtgaaatacgtaaaatttaaatttttttttgcataatttggattagtgaaggtatcaataaaaaaatatcttttgcctttagcgatcaacaaataaagaatgaatagacatagtatctactcatttttttgtatgtgcaggaatgtgctttggtttgaaaccaatataacttaaaccttaattttagatataaagttcctttttacattttaactttatcaaaaaatgttcgatctgccataatacaattaatttaaatattgttacaattttgtattgtgcagcagctttgcttagggattcagatgaaaagtcgtagtgtatgcagataatatttgaaaggagtttcgaataaaagatggatcgaataagtgcatagagctgcccaatttctgcccagaattaatgttaaatgataaaattcagtgtgaattaaataaactgatgctttaaataaaggcttttgtaaacgatgatatgtttttacttaggttgagggcctagtgggtgaataacccgtggaggttcaggccctctcggccgcatctcaatgataccaagggttttgaacctttggtatttttttgtgttttatgattgtgagcaaatgtgtctactaacttgaagtgaagtgcttctatattgtaagtctgtaatcggtatctccattcatcctttttgctgaatgcgtgcggtgtaaatggggttcataacgtaataaagaagtataagacctcttttagtgaaagaggaaggaatactattgatgccaaaagagataaaaccttgaaatttgttggtgatattttagaataaaacttactcttgacttttttattgctgatttcattttgtaaaccgtcgtactgctacacacccgattgctcctaatattcattgttatgttgcttcaaaataagacttgataacgttgtaaccaagtggtacaaagagcacctattattttaataggattgctcttgttttttaaagcgtatattttcaaagccatgtcattgcagaaaagttaaaagaaataaaaaattaatagttgacttaagcaactgtatcaattacgatagaaaaaagttgcttaagtcaatcttttggaggaggtacgtaaatttggcaacaaaacgtgttttggcattcagacaatttaatagattttatacagatattttgggttttctaaatgaacatatttatgacagtccattctctttaacagaaacaaggattttatacgaaatttataatacacccgattgtacagcaaaaatcattcaagaaaggttagacctggacagaggatatgtaagtagaattgtcagaaaattagaagaagaaggcttcatatataagcaaaaatgcagagaagacggacgaaatcatttcctttatgtaaccgcatcaggggaaagtatttataaaagtctggagaaaaaagccaatcagcaagttgaatatatccttgaatgcatagacaaagaagaacaagaaaaacttgtagattctatggaaaccattcaaaacattttgcagcattctttttatgataaagaatctccgatttcaataagagactattatacttcagaagatgtcaaaaacataattgagaaacagcgattattttatgccgaatcccatggctgggatgaaacatttttatcctatcttcgcgatacgtttaaagctgatattgaaaaaatatgggtggcagaaagcgggaatcaatttgcgggttgtatcggcttagtgaatgacgatgaaaaaacaggacagttaagatggtttttagtcgatccgtcttttcagagaaaaggtgtcggcagccgtctgattaaggcacttgttcaatattgtaaagaaaatggatacgagcgtatatttctttggacggtaaaagacatgtcaacagcacggccattgtataaaaaaaacggattcgaaattacagaaattcatgaagaaaaacctttatggggatcaaatttaatagaagagcgatgggatttggaattataaagtgagggggggataggatgccaataaaatatcattatgcatggatcattgtttttgtcacttttttaacctttttagcggttcaaggcgcacgtctttcatttggagcttttgttgaaccatgggaaaaagatttttctatgaatagaggaacaatttcacttatttccactctgagttttatcatatatggcatatctcagcccataatagggaggctggttgataaattaggaccccgaatgattttatcaatcagcacatttttggtcgggcttagctttattttaacgtcttttgtgaatcatccatggcagttatttattctttatggaattgttatctccgtcggtgttggaggggcatctaatgtagccgcgacagttgttgttacaaattggtttaatgaaaaacgcggactcgctttcggaattatggaggcagggtttggtgccggtcagatgcttcttgttcccggctctctcattttgattcaatggtttgattggaagttaactgtagtgattttgggtctgcttttaatggttattgtgtttcctgtcatactgttatttttacggaatcatcccggcgagatggggttatctcctatgggcggttttatcaaagcagaagctgaaagtgaccagcatacggcccacttttctgtttgggcagtgttttgcaagaaacaattctggtttttaatactaccttttgctatatgcggttttacaactacaggcctgatggatactcaccttattcctttttctcatgaccatggattttcaacaagtgtaaccagtgctgcggttagtgtgttggcgggatttaatattttggggataatcatttcaggaattgcggcagaccgttggagcagtaaaaagatgcttattcttttatatgtcatccgcgcattatcaatttgcatcctgttatacagtcatcattcgattatattacttatttttgcaactttgtttggactggttgattttgcaactgtagctcctacccaaatgttagccacgcaatattttaagcaatattcagttggttttattttaggctggttattcctgagccatcagataggatcagcgctgggagcttatgtaccaggttttctttatagtgaaataggtaactatgatctttctttttatttctcaattattattttgttgggagcggcaatgtttactttcttactgcctgaaactgtgaaaataaaaaaagaggaaaagccggagactgattcagtttcatattaaacagctataaaattttcaagctcatcatacgaatgttaattataggggaagaacagattcaacagttgatctttttattaaatttaacagtgcccattttgtgctctcggccgcatctcaatgataccaagggttttgacgcccttggtattttttgtgtttctttttatatgatctactgctcacttacctaaagtaagtaaaaaatgatttacctctttatatcgtaaataaccaaactagaataaataggtaaaaaagcttaacttagtcatattagaaaacaggaagattgcctgatgaaagaagaaggctttcggtttaatataaaaacgcccaaaaaatggcgtttttaatgggtaaaagtatatatctcgaaaggaagatatttaaaactgagggaatatgcttaaaacaactaataaattagaagaggagagagatttaaaaatgtatatgacttgattctgtgcttttttaatttcttaaaagaattaaggactagaatacaaaaattaaagaagacggagaatatgaatgtttaaaaaaactggtatttttatattactttcttttataatcatttcagctttttcacagacggcatctgcacatacagttaaccccgtaaatcctaatgctcagatgacaacaaaggagttgacgaattggctagctcatctgccaaaccgaactgagaatcgcatactgtcaggtgcattcggcggatatacaaatgcgacgttttctatgacagaagctaatcgaatcaaaaatgctattggccagtcacctgcagtatatgcttgtgattattcgagagggtggttggagtcaggaaatattactgatgcaattgattatagctgcaacagtgatttaatttcttattggaagagcggaggtatacctcagatcagtatgcatcttcctaacccagcgtttcaatctgggcattataaaactcaaatctcaaacagtcaatatcaaaaaatcttagattcatcaactactgagggcaagcgattggatgctattttgagcaaaattgcagatggtcttcaacagctaaaaaatgaaggtgttcctgttctattcagacctcttcatgaaatgaatggagaatggttttggtggggactaaccgaatataacaaaaaagacagccagcgcatctcactttacaaacaactttatcaaaaaatctatcattatatgactgatacaagaggtttggacaacctgatttgggtatatgcaccagacgctaacagggactttaagactgacttttaccctggctcttcatatgttgacattgttggattagacgcttatttctcagacccttattcaattaaaggttatgatgagttaacagctcttaataagccatttgctttcacagaagtcggtccgtcgacaacaaatggcatcgtggacagcctggattattcacagtttatcaatgcaattaaacaaaaatatcctaaaaccatttatttcttagcttgggatgatgagtggagtcctgtggctaataagggtgcgtctagcctttataatgatagttggacactcaataagggagaagtgtggcaaggaagttcacttacaccaatcgttgaataaatagaactaaaagcaccatgaagatacaactgtttcttcatggtgcttttttgacaaaaggacgaatgtatttcacgctttagaaaatctgatttcaatggctcattcgatttatcggatggtgtaacaggtgggacgacgatttattttggtcaaaaaaatcagaagcgtatctctgcttttacgagaagaattatgagcaagcggaaaaatacaatataccgttagaagaattggagattagaatcgctttgacattggtcgccatgcagatcattaataattatgtaaggttcgttgatgccgacgaggaagtcactcgggagcattggaaaacgagccttttttggtctgaatttataggcgatgtagggaaactgcaactgtacatgaaaccgcaaagagacttttaccaaaaaacaaggaactggccggaaaactcatgttctcctaccatgatcatggaagctgaactgtcagagaaacaggaaaagatgctggatgtgttttttgctgaagtggcggacatggtgtttagaggcttatgcctttcgaatgaattttatcgtatgagtattgatcgagacgaaaaataaagagaggagagatcattaatgaagatcagccgaattctattgggagtaatggtgttaagtagcattttagcattttctcactttgcgggtgagcaggtttcaatcgagggatttaaaatagcagccgaccgagttggagcataaaaaaaagcgggggatgcccttcgttttttattttgctaatcttggtgagggatatgatgaaattatggaaaggtaatgagtgattacctttccgtaattcgttaattatttctttgagcaatactataattcattttaaccttaccaccgtcagccggtggtgaagctgtaaatgtgtaattgtatgtccaaccaaaccaaccatttttaacctcagcagaaatgtggccttgcttgcctggtgcgatggttcttgagacttttccatcaattgatatttttatgtcattactcccggtattttcaatccagaagtttacttgtgctccgtcattctcatctaattcgaagctccgactccagcttgattgatcaacagggccctttgaaacctccttgtctagagctttgaatacttcacttgcaactgcaaaatttttcgacgatacacttgtagtcgactccgcaaaagcaggtatagcacaagtcccaacaattacaccagctatcagagtcgatgatacacctttaaaaatggacttaaggttcacgatcaagcactcctttttaatttaatttattttattatacatgcatactccgcatatataatacaaataataccatgtaaaataattacagtaaatattttttttggataatgatgtttgcaactcaacttttgtatcccaaacatccgaaatcagacaagtaagccttgatatagctaggtaagtggaaattgcgatcttcttattgaggtactgctactagcaaagtttttccgatacccgcaaaacgaaaaaacacctgtcctttctctaaagtaacgaaaagggtagtgttttttgtgctattcaaaattaatacgtactcttttttactctgtctatctatactgaattacaaaatcggacaagtgaagatactatcaaaagaaaaaactcagtgggcgataccacattacttctcttgttagtggtttcttaggttttagctggaattacaaatttaaagctaatattttagtgattttttaaaaaaagtactgcccaattattgcccaaaattcatgaaaaaagaagaaaataggtaggaatgaagataaagaatgctttatttataaggtttatgtaatacatgatgcgtttccacaaggttgagggcctagtgggtgaataaaccgtggaggttcaagtcctctcggccgcatctcaatgatgccaagggttttaaacatttggtatttttttgtgtttatgattgtgaccaaatgtgtccattaacttgaagtgaagcgtttctgtactgtaagtctgtaatctaatgggtacttcccggtatctccattcatccttctgctgaatgcatgaggtgattcataacgtaataaagaagtataagacctctttaagtgaaagaggaagggacctgttgatgccaaaagagataaaaccttaattcgtgtatatgatggtgggaaatatattcagtttgctttttataatgatgcttcactcaattattcctcgaaaaaaagtttctaaatatagttggactgatatattatgatagcctacatatgtgataacaatagcagatttagtaggtgtaacagaacgtaaaagttagtatttgagtagggggaaattatgctatcacttaatagagctttaaaattacgtgatttagaaatttttcgtgtgctgaaagatggtaacattttatcttacgtaataattgaagatactcgaaagccatttacagaagaagacaaaaaattagaaccattatgttatatggacgaagaagatattaatgcgattttaaatgtttttaagatttcaattgttaatgatgaaaaattaaatgaagctgattcaacttttataagattctacttttccgaatttgttaataatacaaatttaacgaattttattactaaagaatatgtacaaaaggatttatatgattacgaggatgaagatgacatcattttctttaatagaattttacgtagtataggatcagattatgttattaaagaatttgacgatataaattggattcatttatctcaagattgatttctgatttggcccgatgactgcttcagcttgctaggctaggtgcctgatatgatcctcatgctattctattaactcttagtcaggatttaatcgatcaagctataccaataggtacagcattaattttacaaattcaatcatcgaaaaacgaaaaaacaaaatatgacttgtaaattaaaggctgtcttaaaggcacaaaaaaagctcaaactaatgaatttagtcagagcttttttttatgaagtattcccgagtatctgtccttgtttttttaggcaatactacgtccaattctttatttaaccatgcgagcgttttattacgaagatacttacgcatctgttcttctgcttcaagcattaccaagttaattgtacaagaagaattgctggattcacaggagttgcatttgtctcgataaagcaggccattgcttacaatatttttacattgaaaaatgggttttggtccttcaacagcctctattacatcccaaaatgaaatatcttccggggattttgctaacctatatcctccctttacacctgggacagaatttacaataccagctttagataatttaccgaaaacttttgaaagaaatgtttctgaaagtccttggaactctgcaaggtcccgaatcccgacacttttcttggagggaacatctattaaataaaccaggcaatgtaaagcatattcaaccccagcactatactgcatagaaactcacctgcttttgtttttgtaggtaatcacattgtatcttaggagtattttgggtgatagtcaatcataaaacccttctttagatatattatttgtttcatttgacaaaataaaatgaagggtttatattaaagaccaatttaatcgtcgattgaattggtctttaatagaagataaaagggggaatttcaaatgagcaaaacacttatcattaacgcacatccgaaagtagatgatgcatcatcatacagtttgcaggtaatgaaccgctttttggaaacttacaaagaattaattccaaagagtgaagagcttgagcagattaacttgtatagtgatgaagtgcctatgattgataaaacagttttaagcgcatgggaaaaggcaggaaaaggtgatgaactgactggcgatgaacaaaaagtaacggaacgtatgactgaagtattgaaacaatttaaaagtgcaaaaacgtatgtcatcgttttgccattgcataatttcaatattccatcaaaattaaaagactacatggacaatatcatgatcgcacgtgaaacatttaaatatactgacactgggtcagtgggtctgcttaatgatggacgaagaatgctcgtcatacaagcaagcggatcaatttatacaaatgatgattggtatgaagaagttgaatactctaataaatatttgaaatcaatgttcaatttcctcggtattaaggattatcaaattatacgagtgcaaggaacagctttactaagtccggaggatgttttacaaaaagcaaagaaagaagttgaagaagctgcttcaagattagcagggaaaagggaaacctgaataacattgttggttagaacagctgaagtgacagagagattcgtctattatacggtagctaaaagagatttctcactgcttgttatcccttttgatttaacgctattggaacctctaaaaaaccataccaaaacaccccgcaatgaaacgtaatattaatttgcagttatttccgtttcgtgctatgataaaggggaattatttttgttcgtgtaaaggatagtatgaatatcgacttttcgtcttgatgatactttgggcaaggatagtaatacaatgtgtggtatcacactaggaggcaacaaaaatggaacaaggtacagttaaatggtttaatgcagaaaaaggttttggatttatcgaacgtgaaaatggagacgatgtattcgtacacttttctgcaatccaaagtgacggattcaaatctttagacgaaggtcaaaaagtaacgtttgacgttgagcaaggtgctcgtggagctcaagctgctaacgttcaaaaagcttaatcttcaatcgtttatacaaacaggctctttatatagggcctgtttttttatattctctgtataatacttaataaaaaaccctactcaacgttcgagtagggggagatggtacaaggtaatagaaaaaggtttaaaacttcaaaggtttgtatacagtataacatactggattgacaatatgcggaatgtatataaattatttgtttttctgttctcaatataactgcatgttattctttcttctttcactaaaattgctcgttaatttaagcacaaggattaggctgacgaaaactttcgtcagcctttttatattaaggaagaaattaaaattctcaaagttagagcgtgttttgttttgactcaccatttttttcaccataattcatacaaacatatagaaatgacgtaaagtgaagtgggtgaataacccatcactttttgtttctttataaaaggggagggaatactccaagataataaagagaaaacaaaaaagagcccgcaggccctcagaaaacatgagtaaaataattcacttaataaaatctgcgtcctcttccaacgaatccaaaccgtcttcttctttcgaatgcaagaggtgaaaatccccttctaaaaccgccacgaaaaaatcggtttcttgcatataatccaaataaaggcatgggttttcctcctttcaggtcataagttatgagacgcggatctgctccgcaggcgttcaacaatctacaatgattagcagaacaaatatgaaatgactaaggctttgcgaaaattaaatagatcttgtttacaatctattcatcataacctcttcagagtcacctcctgtttggagtaattaatcatcgaatattttatgtgtagataaacaaaatagattgggcgaactttagttattataaaattccacgttatagcaatctggctgaacgtggcaccacacatatgaagaacccttttaattttccatggtgtatccgccatccttctgctgactgcgtgtggcggaagaagtatgacaattcgattgatgaagtgataaagcagtagaagaaagccagaaaagaaataagggcagattcagatgaggataagaaggataacgctgaatttgggtagaataactcttggtgacagattggtacacatttttaaggggggacaactatgattggaatactggcaggaatgggaccaaaatctaccgggccatttgtagataaagtagtagacgagtgccaaaaaatatatggagcaataaatgacattgattttcctcatatgatgatttattcttgtccgactcctttctatattaataaacctctcaatcatacggacatggaaaaggcaattattgagggtgctgtaaagcttgaaaaaacgggtgttgattttatcgccatcccatgtaataccgctcatatctattttaattcattaaaaaaattgatttcagtccctttactaaacatggttgatgaaaccataaaaaaaataccaaaaggctcaaaaaaagcagctcttttagccacctctccaacggttcaatctggaatatttcaagaagccttaatcagagaaaattatgattttttacatcaagatagttggcaaacctgtgtcgatcaaataatagaaaagattaaacaaggtcaaatcaatgagtctattacattatttgatgaattacatcgtgaattagcagaaaaggttgatacggctatcattgcatgtacagatttaaatgttgtcacggataaaaaaagcagcgatattacctttgtggattcatcagcttgtctcgctcaagccattgtcaataagtatgtatcattaacaaaataactctttgaatagttgagtggactttgtgtctgctctttttttatggggaattcatctaaacagtaagccgtctgatttatcagcaaattcagggcgctttttttccgttaaagcgcccgactgcggcagaaacattatccccaaattacttctttgaatttaacttcctcgcattatttttcttttaacattgaatactttcgataagctttatagtaactgatgccaaagataacagccataagggcgggaagcgatctcaaaagggcaaatggagtttcaaataaaaatgctttccaaaacattgcgctttccatactccacagaccttcagctaaatataaacctgaatccttgtaaatcatataagaaaaaaacaagcacagtaagccaaaacaagatgaataacccattaatcttttataataattactctttgattggcgatccgagaagatttcattttgatcatcatcttctttttgccaatatcgcgttccgctaagccatgggctgtttatataactccagccgaagtcttcatagatccctttgtaatctttgaactttttctttgataaataatcttgataatccagccgcatcacatatctcttatcggttttttcgaaggtgtatattcctaatccgctgatatttgtacagcgatagcctttttgtaattgctcgttcagccattgctcctctttttcaatatcaaaaaacatcttaaatttcttcattcgattcacttccttcgtacagggatagaatatgcaataacctattttgttccattttcaaaatgtcgcttccttctgcagttatcatatagacttttctccggcctgactctccaacaggttcaatccagccatgcttattcaagttttcaatcgcaccgtataatgtgccggccgctaatataacagttccgttactcatcttttctatcttctgcatggcggcataaccatgaagcggctcacgcagagctaataaaatataatgcatggtttcagacagcggtaataatttatgtttcatatcgtcaccctctattcagttcgactatatagttcaactttataataaaagtaatacagttcaactgaatagtcaatggttttttcaaaatttgtaaaaataaattgataataagaggacatcaatctaaaaagccgccttcctgcgtaagggaaagcggctgcacgatattatatgtcagccaaatcctcaggggtaattggctgctgtaatttcaaagtatgtgtttggcataatggattaaaagaaaattgttttctaaacggtgcgatcatataattgaatgaaaaaaggaagcatatcatgccgatcaattcttttgaaaactatccgatgagctggaagccgacgattgataaaacggaaaagcccatttataaagaaattgcggggaaattggaacaggatatattacaaggagttttattacccggaaccaagctgcctcctcagagagaattagctgattatttggatttaaatgtaagcactatttcaaaggcttttaaagtttgcgagttaaaaggtctgttgagtgcatctgtcgggagcggtacttttgttgcttacgatgcattatcgaatgcgtatctgctcgaagatacaaagccgaagcatctaattgaaatgggagcgacacttccggatcaggtttcttatgagccgctgctgctccagctgaaaagtatgctgcaagaggaagattacgaaaagtggtttggctatggccggacaggtgaaagtctttggcagaaagatgcggctgtcaagctgattcgaagaggcggatttgaaacgtccgttgatcacattttatttgcaaacggcgggcaaaatgcgattgccgccacattggcaagtctttgtaaaccgggagatcgcatcggagttgatcatcatacatatcccggcttgaaaacggccgcatcaatgctgagtgtgcagattgtgccgataaaatcagagaacaatgaaatgagcccatcctcatttgaatatgcgtgtaaaaatgaaaatattaaaggcatctacctaatcccggattatcataatccgacagcgtcttttatgtctgttgaaaatcgaaagatgattgcgggcattgcaaaaaaatataatcagttcattattgaagatgcatcgtaccatcttctggggaaaaatccgcttccggctatcgcatcatttgcaccggagcagacaattcacattgccggtctgtcaaaatcattagcaccagggttgaggctggcgtatgtcgcagtcccgagtcaatataaggagccgatttcaaaggcgctttacaatttaaatataactgtttctccgctattagcagaacttactgcacgcacgatcgtatcgaatcaatttgaagtcttaattgaaagtcatcgtgaacagaccattcgcagaaacaaaatcgtaaatcaatatttacatggctatacgtgtgcaggtgctgaaacgggaatctttcgctggttaatgttacccggaaacatgacaggtgcggaatttgaaaatttagccgcgcaacatggagtgcaagtgtatgcggctgaacgctttgtcgttgggaatagttgtccggaaagggctgtcagagtgtctgtctgtgcaccgaaaacgcttgaagagcttgagcagggcttaatgattcttaaacgcttgctggatgagcatatgtaatattgttcgccatacaattctcatattgtatggtttttttgtgcgtgttatgataatccaaatttgttggaggttataagaaaggcaggtcgggttatgcttcaaaaagacagtataaatgtatcagatggtcaatcggcatcattgcggcaattcatagattctcctgaaaaacaaaaagcgttatataagcgtactttagctgtcgtcagtctttcacaaattttcggaggtgcagggctggcggcaggagttaccgtcggtgcgcttattgcacaggaaatgcttggtacagatgcgtttgccggtgtaccttctgctttatttactttaggatcagcaggcgccgcattatttgtggggagactttctcagcgttatggccgtcgaacaggtctttcagccggttttatgattggcggactgggagcgataggagtcatcattgcggcaatgataaatagtgtttttctgctgtttgcttctttgattatttatggtgcgggaacagcgacaaatctgcaagcccgctatgcaggtacggatttggcaaatcacaaacagcgggcgactgctgtcagtatgactatggtttttaccacatttggtgcagttgcaggcccgaatttagtgaatgtaatggggcaattcgcgctctctatcggtgttccgtcacttgcgggtccattcattttagcggcagcagcatatattttagcaggtgccactcttttcatcatgctccgtccggatccgttagtcatagcaagaacaatagaaatttccggccaaaaacctggtgatagaggccaagtgaccgcggacgaacacacaaagaaaaaaagagggatcattgcgggtgcagcggttatgattcttactcaaattgtaatgactgctattatgacaatgacaccggttcatatgagacatcacggtcatggcttaggagcagtaggtcttgtcattggctttcatataggcgccatgtatctcccttcactggtgacaggtgtgcttgcggataagttaggccgtactgtaatggctgtatcttctggaatgacgctgcttttggcaggactcgtatcggcatttgcaccgggagattctatgattcttatggtcattgctctatctttgctcgggttaggatggaattttggtttaataagcggaactgcacttattgttgattcaactgaagcttccgctcgggctaaaactcaaggtacagtggatgttttgattgcgttgtccggagctgccggcggagcattgtccggaatggtcgtagcaggcgcaagttacctaacattatcacttggcggaggaattttatcattattattaattccggtggtgatatggtcacttggaaataaagaataggtttgcccaaaatgaacacaaaacggcgtaaatggatacaatgaataacttcaaatacttgaaataacaggctattaagggcctaggtgggtgaataacccgtgtgaggcgaggttcaagtcctctcggccgaatcgaaaaataccaagggtttttccgcccttggtattttgtccgttcttatttgctgttccagtttttctctataaatttattcacaggctgtaagttggttttgttcgcaatttcaatgacagcgggaaccacggaagggtccgttttggagaagttaggaattcgcgggtctaaccggaaaaagcgatctcccagaagattagcactgaccatggattcatagtaaccgtttccgccaccgacaatctgcagaaatggcagtaaaggttcattaggcgacctgtccaaaaggactccccaatttggaggaagattcttcagattttcgggacgtatgttatctgcacttaccattccccaccccctcgtatctcgtcttaaccgagtcggggcttcacctgttccaatggataatactgcaatttgatccaaaggcactttggcttttcctactgcaaacgcgatactggctgtactggggttcgttgctactacatatccgtccacgtagttttgataggcgcgttgtgtcgcgggagcaccgctgcttcgcagtatgacatcactcactttctcatctaaatagggagagccgggaaagttgtgaaataatacaggagtccaacgatccagtttaggagagtataatttgaatgaagggacaacaattcgtctttttaaatctttgagacgaagatctgccgggaaaaagtttcgtaccgctttaataaaaccggaatatggtaattgttgattgaaaacaggtccgcccggccgggaaatgctgaatgctggcaggatattttccttaaaatagcggaatgtctcctgcggtgatcttccgctggctaatgcaagggcagtgaatgaaccgattgaatttcccgaaaacacatgggttcggcttattaatgttggattttgtttaaccagtctgttcaatagttgtaaacttaaagcacctaaggtaccgcccccatcaaaggtcataatccgatattttgccaaagttaatttctcctttcaatttaaaactatcattcagtatatgtttctccagtgtctattgtatggatgaatgaaaatttctctaaaatgtgttgattaatcaaaataatagtccaagctgtgattttttatttacataatatgtaatgatttaatcatttaatcatatgagaaggagtgatggtcatgtattataaccaagatgaagatcaaatgttcattccgaagaaaaagccatacaacgaagcctgtgacattggtcatgatatggatcaggtggaagaagcattaagagcagaagcagcaagagaagcagaggcaagagcaagagcagaagaagcaatagcgagggcagaagaagcaagagcaagagcggcggaagcaaaggcggaagcaataagattagcagcaaaagccaaatgtaaaaagcgtcataagaaagagaaagaacatgattgcaaacgtaagcacaagaagaaaaaataaaattttaataatgtaaaagacttgaatcattttttcttgaaagaaaattttcaccgcggaaattcctgcatggctgttggaggagcaatcacgaagcttgctcagcagaactaaacgggcaggcataaaaaacatccggctcataacgtttagggaactgtctgtcggacagcctacaaaagtcaatatgttatcccagaacgttataaaaagtgagaagagacaagagagtggcagcttgccgcccttgtctttttttgtgtttttatagagggataagtcgatgatcaagttaagctttcgcatatatttatctatttttaagttagtagaccatctgtctaagaatttgtccaaatcctacatatactggtaccggaatcaaatgcttattgggagtgaaatagatgggatcagcacagttaacaggacgtgtaatcttcaaaggggaccccggctatacacaggcggttaagaattggaacccttatgttgatgtctatccgcttgtctttgtttttgcacaaaattcatacgatgtcagtaatgctattaaatgggctcgtgagaataatgtgcctttgcgtgtcagaagcggccgccatgctctggataagaatctttcagtagtaagtgacggaattgttattgatgtgagtgacatgaataaagtcctcttggatgaaaaaaacgcgattgcaaccgttcaaaccggcattcacgttggtccgcttgtaaaaggattagctcgggatggttttatggctccgtttggagacagtccgaccgtcggaatcggaggaattacgatgggcggcggatttggcgtgctctcacgatcgattggccttatcagtgataaccttctcgcactgaaaatggtagatgcaaaaggcaggattattcgagcaaatcaatctcacaatgaggacttactatgggcttccagaggaggcgggggaggtaatttcggatataacacccaatatactttcaaagttcatcgtgctcctaaaactgcaaccgtctttaatattgtttggccatgggaacaattagaaactgtatttaaagcttggcaaagatgggcgccgtttgcagatgaacgattaggatgctaccttgagattttcagcaaagtaaatggcttgtgccatgcagaaggaattttcctcggttcaaaacctgagctgattaaagcattaagaccgttattaaataccggaactccgacacaaaccgtaatcaaaacattatactatccagattgtatagatttcttagaccctgatgaaccaatccccggcagatccgatcagagtgttaaattttcctcggcttgggcgctcaatctttggccgcaagaacccatatcaatcatgagacaatttttagaaagagccactgggacagaaactaatttctttttcataaattggggcggtgcgataagcagagttcctagcagcgaaacagccttcttttggcgccggccattgttttatacggaatggaatgccagttgggaacataaatcacaagaagcctcgaatcttgcgtcagttgaaagagtgcgtcagctgatgaagccatatgtaacaggttcatatgtgaatgttccggaccaaaatattgaaaatttcggaaaggcatattatggctcaaactttgcaaagcttcaaagaataaaggcgaaatacgatcccgaaaatgtatttcgttttccgcaaagcatcccgccgtcttatcactagtgtattgttttgttaagcattctaaatatcatcaagttggaacacaccagaaaattcaggtgtgtttttatttttgcttttatttcttaaatgaaaagcactctccatcagaaaatagcatatcagttttctaatgtatcccagtgcggattccaaacgatttcccataggtgcccatcggggtcttggaagtgaccggagtatccgccccaaaaagtatcatgagcgggatcagttatagttgctcctgcctgttttgcctgatccattactttatcgacttcagctttactattaacattatgccctaatgtacattcgacagggcttggtgcggttaaagcaacgtttgcttcatgtgcgatgtctttgcgatcccaaatggcaagtttcagtcctggctgcaagtcaaaaaaggcaactgcaccatgctcaaactctttaccgactattccttctgtaggcagacccagaccatctcgatagaagtgcagcgctttttctaaatgatctacacctaacgtgattactgtaatctgtggtttcataaaaatgcagcctcccatgctcatgataagaaaattatatcaatcattgattaggagagacagcggaagttatttaattattcagtttgtttttggggatgtaaagagggtattggaaatcttcattaaaaattatagtaaagaacatttatattcagatatgaacacatgatcatatataattgtttgtgtgtgacatgttagaatgcttcataacagaaaagaaataataaaagcatatgcatcaagaaattttaggttaaggaggagatttttatgggtcacaatcatactgatggggccaacaaaaaggttttattgatctcttttatcatgattacaggttatatgattatagaagcaataggcggatttttaacgaatagtctggcgcttttgtcagatgcgggtcatatgctgagtgattcaatctcattaatgattgctctgattgcttttaaattggctgaaaaaaaggcgagtcacaataagacgttcggctataaacgatttgagattcttgcagctgtgataaacggtgttgcattaattcttatttccctttatatcatttatgaagcaatcaaacgtttctctcatccgcccgaggtagcaacaacgggcatgcttatcattagtatcatcggattagctgtgaatatattggtcgcatggattatgctgaatggcggagatacaaagaataacctgaacataaaaggagcttatttacacgtaataagtgatatgctcggatctgtgggtgccattctagctgcgattcttatcatcttctttgggtggggctgggcagatccattggccagtgtcattgtggctgttcttgtcctaaggagcggttataacgtgacgaaagatgccattcacgtattaatggaaggaactccagaaaatattgatgttactgacatcattcatacaattgaagagacagagggcattcaaaacattcatgatttacacatatggtctatcacaagcggattgaatgctctttcctgccacgctgttgttgatgatcagctgactatttcagaaagtgaacgtattttacgcaaaattgaacatgagcttgagcacaaaggcattacgcatgtaacgattcaaatggaaacagccgcgcataatcacgacaatgcgattctttgtcaggccaaaagtgagcagacggacggccaccatcatcattaaatttttatctgatttgaatgcagagatggatgggaacgttaaatggtatttctcatcgattgatgcaggatgacggcacccagccagcggctgttttagaaaaagactaactcttggagctgaatgaaagctttccgggatgtatacgcttggtaagtaaatttacagagaattgtttagctcacgcacatagaaaagctccttgttaaaggagcttttctactctttacatatggttcatataaaatgtttgctttcactccccgcccagcctttctcatttaatcctttcaagcacaagtcgaaacagctcaaataacaggaagttaaaaaacatccaaaccccgccgtatacatatccgcccactatgtcgcttggaagaacgcttgtccatttaatatttacaatcgcgagacctattaataacaataatccaaataaaggagccgcaatggtcacataatgtgtgtttgaatgacgaacaagcaaaaatatgcaagttccataaatgataatcatcatagctgcattcagatccggaaaatcggcagaatgaaatttccccttaaaaccaatcgttcgaaggatagagaaggcctccataataaattcacgaaaaggggctcctccgagtatggaaaccgataataatagatactccagcagcctattctgattcttcaaccaaatgactaatagggttaaaacgatgaggccggcgatgccagcgggttgttgaaaaatgaataattctttcatccagtccatataaaaggcagtataaacgacatattccgcaatttgattaaactgggcaacgtcatttgcaagataatcctgagctaagccaaacatcaggatcacaaatccaattaaaactgacgtgaggcaagtaaggaatatttcagtggctcttatcgttctgaatcgatttgttaatctcgtcagccattggataaaaaagtttttaatctggattttataaaatctaaaaagaagatatcccgctaacaaaacagccagaacaagaagaaaaatgattaaatatttgcttgctgcctgatgtaaggtttcccatttaggacccaataatttccctaaagtaataaaacagcttccccacaaaatggccccaatgtaagcagggataataaatgtctggaatgacattctggaacttcctgatacataaccggcaaaatgcctgaccccgggaatgaaataagcgaacacaagtaatttacttcctgaccgctcaaaccaagccgctgttttgttatacctttcgggccctaaatgaacatactttccataccgctcgattaatctatatcctccggttctgccaacccaatatgtgattgttatccccgtgcccgcggaaataaaggcagttagaagtgctaaagcataatccatttttccttgataaacaaaataccctgcatagctcatgatcatctcggctgaaattggaatagctaagagctctaaaataataccggaaaataaaatcagataactatgttgttcaaataaagttattaaatgtgacataaaagcctccggatttttatctaacaccgttaccttgatctgcaaagtatcattatttttttagtaagtttagcattttcagaaacttgtaagtttttaataggaactagtttattgtatagagtaaggatgcccgattccgaaaaaaatataacatcagtccaagcaattgcgatgcttactcatatgtaaaagcgatttttaaagctttaacttttaatgcaaagctgacgggtttatcaattgcttcgaatttttgtcacctcttctcattacgtatcaaaatatagtaagtttgtggagcagagaacagtatcattgagggacaatggatgagtgacctgcggaagttcaagttttctcagtcgtaatcatgataaggggaaaattccttagcgtggcacattctcactgtaaaagcataggataacatcataaaaatttaaaattgcggggatgaaaaatgtattatatacctttttcacatcaatgttattattgtgtgaatgtaccgatgtatagcgatggaagatctgtttattggactgttccaaataactatgatccttcatacgaagatagaaaccttctcttgaaagattatggaccaaaaccatttgtcgtgaatatcaataaagccgcaaaacaaaatcatacgttccgtactgccttatggaccggaaaacattttcaaattactttgatgagtatcggcattggagaagatatcggtttggaaatccacccccacgtagatcaattcttacggattgagcaaggccggggaatcgttaaaatgggcaggagtaaggaaaatttaactttccaaagaaatgtctatgatgactttgccattgttgtacctgcaggcacttggcacaatgttattaatacgggtaatacgccgttaaaactatattcaatttatgcgcctcccaaccatccatttggcacggttcatgcgactaaggcagatgcagaggctgcggaaggttagcataaagtatactgcagaggtttgacaaactgggattccgcctttctggctgcctaagagtatggtaaataaggccgatttaatatgaatcggcttattttttgttggatttattttctttgaacagccttggatcgctgcgggcaatgtatcggttttatcggccttaaattctccggtataccccggcacgagtccaatatggccttcttgattaggcttttcagcaaagaatagctttttcattcatttggcaaacgttattgatttatttgcggaataacatataatggaaccgtcaaaatataatctcgttagaagggagattcatatgattattaaaatgactcaatgtcatatgaaagacttcaataaaccaaatgaacctctggttgttttcgggagaattatacccgcacttgaaaacaatgtgtggtcatatactgaggaacggttttctaaaccttatgttaagaaatatgaagatgaggatatcgatgtcagttatgctgaagaagaggggaaagctgtttttttgtattatgctgacaacaactgcatcggccggattaagattcgtgcccattggaatgggtatgcgctgatagaggatattgctgttgcaaaagactatagaaaaaatggtgttggaacagcattattaaatagagcgatggagtgggcaaaggagaatgattgttgcggtcttatgcttgaaacacaggatattaatgtgtcagcttgtcatttttatgccaaacacggctttgtaataggcgcagttgatactatgctttattccaacttttcaacggcaaatgagatcgcgattttttggtactgtaaattttaattgctgctgaattttaaacgggcactattgtgtgcgtattgaggaaagacgaaaaatgcagacagggctgcaaaatggtgcataaaaaggaagggggcataatccttccttaaaagaatcttcaataccttttacttctttgtataacattccttttttgaaatcggcacccaaatttcgcttttgaaagatggcgatgttatatccttatgctcgttccacagtatttccgggccttctacttgttcataatttgacgatggaaaccattcggaataaatccgtccccacacttcttgcagcgcatccgggaatgatccgattgcttcgaatacagcccacgttaaggcaggaactttaagctgcgataggtgatttgggcaatgtttcgtcgttgctgcgccaatatagtgatcaagctcccctttctcctctgtacggccttcagaaaagtttgtggatgcactaatgagtcccaaaggtgttgtattagaaagctctttaagttcatttattgtttcttcatctaaactttcccacatggatgcaatatccggattcacccctttgaaaataataggaactcttttcttaatgccaacgatgcgaaatgcctctttttcttcgatacgatagttcatttcatttcctcctttgattgataactggaaggtcattcgtggataagctttaagtgaatggccattatgtttagcttcagatggtcttatgccatgcaaatgttgaaatgctcgagcgaaagaatctggtgagtgataaccgtactttattgcaatgtcaataacctttgcgctgcggtctttaagttcaaaagctgcaagagtaagacgtctgcggcgaatgtattccgataatgaaatacccgtaaggaaagaaaacatccttttaaaatgatattcagagcagaaagcaagctttgctgcttctttaaaatcaatatcgttcgtaaggttttcttcaatatacgttagcgcactgttcatacttttaatcgaatccattttattgacctcctttaacaaaagaataacaggagcggcgtgtatctgcccgacattccgtgcacggttttgcagggttaataaaaaacgttaccatgctataagggcatttcatacggtatcttatctgaaactgtatctttttaaatgtcagtcgatgtaataccctgcaagccatgcagaatctaaatgctgcaatccctgccccttagcttattagataataaaccggtcaatctggagcaattaaacgaactgatcgatgaagtgacataaatataaaacattactataagaagattggtattcaagcaggcagttatagtcaagcattgttatgttttaaactttacataggggaacccttatgatatggtgattattactaatattgacaataaagaggtgaaagcaatgataaccgtttttagaattttgtatggttcagatgcaaaaattggaaatatcttggccgacaaagggagcagtctgtccttttttaagccaaataaccataaaaaaacagttatcggcgctttttctctttggcaaataaacgttaattcaatgacatgatgtccttgtttatttgtgcatgattttatttaagcgcagcaccgataattgtgtcggtgtttttttgtgcctaattttaaaaaaggttagatgatgactcccttctatttactcaaacaaacgagagttttatggaaggatgagaaaacatgcgacaaaaaaacaagtatataagaattcaagagttcttgaaacagaatgaatttcctgattttagaatgaaacaaatcacaaatgctatattccatgggagaataaatcatttcaatgaaataacggttcttcctaaatcgttgagaaaaatgttagttaaggagtttggagagtcggttttaaatattgctgctttaaaagaacagcattctgagcaagttacaaaagtcttatttgaaatttcaggagacgaaaaaatagaaacggtaaatatgaaatataaagctggctgggagtcattttgtatatcctcgcagtgcggttgtcattttggctgtacattttgtgcaacaggagatattggtttaaaacacaacttaacgtcagacgaaattactgaccaaattttgtactttcacttaaaagggcattcaattgatagtatctcttttatgggaatgggagaagcattagccaatagacaagtttttgatgctttacatgtacttacaaatccggagttgtttgctttaagtcctcgcaggttatctatttcgaccatagggattattccgggcattaaaaaaatgactcaaaactatccgcaggtcaatctgacgttttcattacattctccttttaacgaacagagaagcaagttaatgccaattaatgaacgctacccgttaatggaagtaatggacacattagatgagcatatacgtgtgacctcaagaaaagtttatattgcttatattatgctgccgggagttaatgattctattgaccatgcgaatgaagtagtaaagcttttaagaggcagatataagagagggaacttgttccatgtaaacatcattagatacaacccaactgttagctcacctatgagatttaaagaagtaaatgaaaatcaagttgtaaacttctataaaacattaaagtcagcaggaattaacgttaccatcagaagtcaatttggcattgatatagatgccgcttgcgggcaattatatggtaactatcaaaaaaataatagctaataaagatgagagtcatgtttctaacgtgggaagcatcgatacggggattgtgataagaggaatggagtgacagaagagaacgcgggaaagtgacggatacgatatagcggaggggttttatcgttagtattagttccggcggtgatatagctttagggcaggaaatgacacattgacttcatattatttcatttgataacataaaatggttattttagtgaagaatcaggatatccattttgataaaaaaaaggagtcataacgttgttgaaaaggttttttcttgtttttcttacgctgatgatgtctatatttgctgtactcgcggctgctgaagagtctcccggcgaacatgtcatttcatttgacgagcctataattttattggtatcactcggaatcattttatgtttattcctccctccgttagtcatgtccttttttggcagcttgattgtgagaatcatatccggagtctatcaatgttttatcgttctcactttcgcagggctcatcccaattggatttcttattcccaatggctatttgacacttcttgttgccgttgcgggaactttggtcagttcagccagtgttgcggtcaccttattcgctggcaggacaaagaacacaaggaaagttagaaatgatactgaaactaagctttcgtaggcggtcccaaaaacaccaagtgttacagacacttggtgtttttttattccggcggcgccaacccgattcttataaacaaaagaaggtataatgggcaggggagggttgccagccaatgaaaataaccagagaaaaattagaaaatcagcaaatttggatatatggtgtgtctcttgtgatcggaggaatagcggggatcgccgggaaagattcaggactcacctggggctggacgatatcaccgcttattgctgttctcatgtatgccatgtttgcccaaattcctttcttaaaactgagggaagccatttcaaacctcaagtttatggcggcattactgatcggtaatttcttagctgtacctgtcgttgtgtgggttttgaccgccatttttcctcaatctccgcctatattattaggagtttgtttggtattgcttacaccttgtatcgattacgtcatcgtctttactcagctcggcaaaggaaatgagaaattaatactggcttctacaccggttttgtttgtcgttcagatggtcttgctgccgttatacctgtggctgtttatcggaaaagaggtcgtaggagctgttcatgcggggccgtttctggaagcattcttatttttaatagctgcgccgctgctggcggcagtcatgactcaattatgggctgataaaaagccggcgggagaaaaggtgttagaatggacagcgtggatgcctgttccttttatggctctagtcttactggcggtcgtcgccacacaaatcggcaaagtttacagtgattttgacatcattgtacgtgtgattcccatctatctgttattcttgctcattatgccgtttgtttctcggtttatcgcatatgcatttcgtttggatacaggtgaaggaagagcactgatcttcagcacgggcacaagaaattctctcgcagttcttccgttggcgctggccttgccggatgcctgggcctcactggccgctgctgttatcgtcacacagacgattgttgagctgataggcgaattggtttatataaaagcggtgcccgactggctgctgaaataagccgtgttccttgtcgggcggattccgtctgaactgaaaaaaacataccaatagatattggtatgtttttatgcggattataaagtcgaaatatcaataacgaaacggtagcggacatcgctttggagaacccgttcgtacgcttcgtcgacttgattggccggaatcacttcaattttaggagcaatgccgtgctcagcggcgaaatcaagcatctcctgagtctgcggaataccgccgacaagtgaacccgcaatgctgcggcggcccgtgattaaggagaatacactgtatgagtccggattagcaggcgctcctacatttactaatgtaccgtcaatgcgaagcagggataagtaggcatctacgtcaaggttcgcggacaccgtatttaaaatgagatcaaaacgtccggccagctcagtgaatgtatccggattgcctgtcgcaaagtaatgatcggctccaaattcaagagcttcgtcctttttattcattgagcggctgaggacggtgacctctgcgcctaaagcgtgcgcgaattgaacggctaagtgtccgaggccgcccattccgacaatcgccacttttttgccgggaccggcattccagtgtttcagcggggaatatgtggtaataccggcgcacagcagcgggctggcagcatccaattccagctgatccggaatccggacaacgaatctttcagtgacaactattttctggctgtagccgccgtacgtaggatttccttcgtagtccaggttattataagtctgaacaacaccttttgtgcaatattgttcgtcaccgttgaggcagtattcacactctccgcaggagtctacaaaacagccgacacccacgcggtcgccgacggcaaatttggtgactttttcgcccacggcttctacaacaccggcaatttcatgcccgggaaccatcggaaaaattccgccgccccattcatcgaatgcactgtggatgtctgaatgacaaatgccgctgtacttaatgtcaatcaggatatcgtgcggccgtaatgctcttctctcaatcgtcgtccgttcaaatgcagcttttgcatgcggagcgcttaacacacgagttggatgattattgcacatggttatcttcctttccgaaataaagtggtgaatcctcttttcaattttactttaaatgttaaagcggactttaagtcaaggcatttggtttatttttttatgaaatgatattctataatggcacgcttatgaaaggtatgatagatgaaggatgggtggtaagaacatgaagattgcacaagctgcaaagcaggttgagttatcaaccgcgacgcttaggtattatgaaagcataggactgatccctccggtaaagcgcaatggaagcggcatccgcgattatgatgaaaatgatgtgaattggattcaatttataaaatgcatgagaagtgccggcctgtcgattgaggcgctgattgaatataccgctttatttactgaaggagccgatcatacgattgaaccccgaaaaaacattcttataaatgaaagaaaaaggctgaaggagaaacagagagaaattggtgaaaccataaataggttaaacaagaagattgaagactacgaagacatacttgaaaatgaagcgaaactaaagggcagcttgaaagctgaatgtatttctgagtgaagaagatgacctgagcgccggccgcaagaaatgtactaagggaacaagccttggtttttttattttctgctgactttatccgcatctttttgggaaaatataaaaaacccacaatagagagaaatgaatctaatttaatctttatttatccttttttcagcttgactttttcactgcagacttttaaagtgtgaaatgttgcttagactgtgattagcgactttaatgctgaaaagaggtggtttacccagatgaacaataataagaacccttgggctttattgccattagttttattcgtagggctttttgtcggctctggtctggtgaccggagatttttataaattgccgatcttgattgccgcgatcattgcatcagcttttgcgctgttatttaaccgcaagaaatcgctcaatcaaaaaatagaatggtttgcttccggtgcgggacatcctgatattatcattatggtgatgatttttatattggcaggtgcctttgcttcagcggctgaagcgatgggtgcggtgcattcaactgtcaatcttgctttgagcattattccgcagcagtttttgctgccggggctgttcatcatttcttgtttcatttctatatcgatgggaacatcaatgggaacgattgcggcggttgccccgatcagcgccggtttgagcggagagctaggcatcccaggcgcgattacgatggcggccgtcgtcggcggagctatgtttggagataatctatcctttatttccgatacgaccattgcgtcagtccggacgcaaaaaacacaaatgagagataaatttaaaacgaactttctgattgttttgcccgctgccattgtcactgttattatcctattttttattccggcaggccacgcaggccatgcgggcgctgaatcttacagctggatcaaagtgcttccttatgtcgccgtgttagtctttgcgttaatcggttttaacgtaatggctgtcatattcggcggattggttttaacgggaatcatcggattagcgggcggcagcctgacgtttgcatcttattttaaggcgattacggatggaattgccggaatgtccgaccttatcatcctgtccatgctgatcggcggaatggtcggcgttatgaaacaaaacggcgggatcgactttttactggagttcattacgaaacgaatccgttcgaaaaaaggcgctgaagccggcattgccggtctggtcagcgtgacgaatctggctgcggccaataatacgatctcgattatcgcagccgggccgattgcaaagaatatcgctgatgaatttaagatcgacaacagaaaatcggcaagtattctggatatcttttcgtgcatggtacaagggctcattccttacggcgcgcagctgttatcggccgggaaattcgggaatatttcacccgtcagcatcctgccgtactctttctatcccgttctcatcggaatctgcggcattatcgccattatgtttggcttgccgaagtttacaagaaatacgaaataaaaaaggcgtcgaatggcgccttttttatttcatgtcagccaggcatgtttcaaaagctgaatgccctgcgcgatctgatcagtatcaagatgggcgaaccctaactttatgatcggcggttcaggctttccggaaacgaaatagatggcggtagggtataccttcaccccgtactgaaaagcgcgctcgattaatgtttcttctgaatagttcaggtgaactctcaccaatatatacaaccccgactgctcgccgatgatcgtcacatgatcgccgaactgctgcttgatatgtgaaatcaaatgctgcattttgcgcttgtagacagtgcgcatgcgtttaatatggcgggtccactcaccagccttcatcaattcagccatggccagttggttaagcgaagaagcggtgctttcaaaataaagaaaccgttttttataccggtgtaaaatgcgctgcggcaaaaccatatagctaatgcggatgcccggaagaaaggattttgagaaattccctaagtaaatcacacggtctgattgaatggaggcaagagcgggaaacggctgctgcgtataacggtattcactgtcataatcatcttcaagaatatatccttctcttttattcacccaattgatcagtgtttggcgctgctgaatggacatgcttacgccgtaagggctgtgatgggaaggggtcacatagattaatttttctttcattgcgtgtaattgagaaaaatctgctccgttttcatagacaggcatcgtttcaagtgacagcccatgaaattgaaatgcctctctggcaccgtcaaatcccgggttttcaacgataattccggaaaaatcttctttcagaatccggctgagataaatcagcatctgctgtgtgctgctgccgatgataatggaatccgcgtctgttttcaccccgcgggattccaagagataagcggcaatttgttcacgcagatccaactcgccgaatgggtcaccgtacaggaagcttttctttgatgtcaaaacttgattgtataattttctccatgttttcagagggaaatgcttttgatcgacggctccggcgcgaaaatcaaccgagaccggctgcggcgattctgttttctcagcttgaacaatatcattttcttgttgaaataaagagggttctatttcgtttgcaaaatatcctttgcgcgtttcgccgcgaatgtatccctccgctaaaaggagatcataggccatcagcgttgtattgcggcttaccagcagggaatccgccagctcccgaatggatggcagccgctcatttgcctggatatttccctgctcaatcaacgtcttaaattgctcgtaaatttgtttatatttcggggcgtcgcttctgaaagcaaaaattatatttttcatcagatgttctcctctgacatgtatatttatccgaatctgtatctttttaaatgtcagtcgataccttattatagcggaaagcgctttattaaatccatgttcagagaggagaatttttatgtatattcccgctccatttcagcttagtgaagctgatgcgagtaatgtcatcaaagagtatggtttcgcaacattgttttccacggcagggggcatgccatacgcaacccacctgccattgatgatgagcaaggataaccattacttgtacggtcattttgccctgccgaatccgcaatggaaagagattgaaggccaaagcgtgttagccgtttttcaagggcctcattgttatatctcgcccaaatggtatgagacgaatcaggatgttcctacatggaattacgtggcggttcatgtttacggagaggcggagcttttagataatgaagaaaccgtgcattcgatgagtgatctcgtattgaaatacgaaagccccgacagcccgtataaattagaggatatcgatgcgaaattgctggcaggcttgaacaaaggggtaaaaggctttaaaatcaaaatcagcaaaatagaggggaaagcaaagctgagccaaaatcaatcagccgcaagacaagagctggtcgtacaacagctcaaacagattcctcatacaaatgaacagctcatttccggcctgatggaagaaaacatcaaacggattactgaaaaaaactaaatgaaactcaaaaacataccagcagaatgcggtatgtttttttctggttatcaagcttttcttgggatgaataacgattcaaacaggaaccgcatgaagcaaaatttttcatgaagaatacaccaaaaataagctgtcagcttggtccctgacggcttattcttggcgaaagattatttctctgtggcgaaataaagcaaagcgatgaccggaaaagtgataccaatccataatgtgatactccaaccgcctgaagcatatgcccatccgccgattgatgaccctatagcaccgcccagaaagaaaattgccataaataatccgtttaatcgactgcggacttcaggccccaacgaaaaaattgaacgttgactgagtacgagattggctgatacacccacatctaacagaatagctgccgctactagaactgctattccgacgggggagctgctctgaatcatgagcggcagtaataaagaaacagtgacagcaccgagagcgattccggtggcaagccgggtcaagccgcgatcagccagacggccgcctatcggtgcagcggctgcacccgcaatgcccgctaatgcatatagcgctattgccttctgagaaaaatgaaaagcaggaccggacaataataaaggtacagtcgtccagaacaagctgaaagctccaaatacaaacgcatgataaatggcacggcggcgtaagaccggagtcgtgcgcagcagcttccacattgaaccgagtaagacggtatagtttgtgtttgctgttggttttctggcaggaagcacttttgataacacgattgccaggacaacacttaacgcggcggataaagcaaatatggcattccacccccaaatatccgcgaccagactggatatcggacgggacagcataataccgagcagcaggccgctcatcacattgccgacaacccggccgcgtgcagcgtctggtgcaagatatgatgcaaacggaacaagcacttgggctgcgatcgatcccaatccgatgaaaaacgcagcggctaaaaacagtgttccatgcttcacaaatgctgtcagtgtcaaagcggctgcgcttagaaggagcgatacaacaacaagttttttattttcgataatatctcccaaagggacgagaaacagtaagccggcaacgtatccaatttgggttagtgtgacaatcaatccagcactgctgggagaaagcccaattgccgcactaatggatcctgccaagggctgcgcataataaagattagcgacaatgataccgcatgcagtcgcgagaagaagggttaaaccagatgaaatcctctgatctgctgtttgtttgttttctttagccataaaaatgaactcctttttaagtggtttttaatgatgcttgataaatgatttgctgattctaagacttcctcaggttattttataaactaaacgtttagttttaatcataagcaaatgatatactgaacgttcagttttgtaaataggtttctgttttatttttttaatcatgttacgtatactgaacgtatcgtttatatttggggaaggaatgattcatgtgcagaataaacgagggcggccgcgcgatgaaggaacgcataaggcgattctttctgcagcttatgacttattgttggaaaaaggctttgacgcggtgacagtcgataaaattgcagagcgtgcaaaagtgagtaaggcgacgatttataaatggtggtcaaacaaggctgccgttatcatggacagctttctttcgacggctacggacagactgcctgtgcccgatacaggatcaacagtgcaagatatattgacccacgccacgaatttagcaaggtttttgacaagccgtgaaggaacagttattaaggaattaataggtgcgggacagctggatgcaaaattggcggaagaatatcgcacgcgatttttccagccccgccgcctccaagcgaaaggccttctggaaaagggaattcagcaaggtgaattaagagagaatcttgatattgaagtaagcatcgatctcatttacggaccgattttctatcgtctgctgataacaggtgatgaggtgaatgattcctatgtgcatgatttggtgatgaatgcatttaagggagttcaagctacctgaataatcgctcgaatcggatgcaaagatatttgtgcctatggggcagaaaataataaaaaagccgaacaagttcattgttcggccttttctggtttatttgcgaaccgccgggcggctgccacgcaagcgataacgccgacattcaccgctgcaagtccccatcctactttttcgtgcagaatcatagcggccagtaacaggccgaagaaaggctgcagcagctgcagctgtccgaccgccgcgataccgccttgggcgagtccccgataccagaatacgaacccgatcagcatgctgaataaggacacatatgcaagacttagcagtgcaggcgcgccgatgtttgaccatgagtgcggaataaagcagacagacagtatgaacataaggggaagcgataaaacgagtgcccaagagatcacctgccagttgcccagccgccgggagagacgggcgccttcggcataaccgagaccgcatacgataatcgaagcgatcatgtacgtatcaccgagaggagaggattctcctccttgaagcagagcataaccggctacgaggatgctgccggcagccgagaaaatccaaaagaccggactgggccgttcgcctccgcgcagtacgccgaagatcgccgtcgcaagcgggagaagcccaatgtagacaatggcatgtgcggaagtgacatactgaagcgctaaggctgtaagcagcgggaaaccgattacgactccgaccgctactgttagtagtgagatgatgtcgcttttggccgggcgtttctccttaaagatgaggagcagagcgcctgccaatataccggctatcgcggcgcggcatacagtgagaaataccggatcaaagtccgctacagccaagcgggtcgcaggaagcgaaccgctgaaaataagcacgccgataaatccgttgatccagccgtttgcggctttgttcattttcaatcactccaacataaaatttgctttatccggtttgtgtttctaaatcgattttcaaagtttataatgactataaactgaaattggccttatacaaatggccagtttttataaaaagaagaatgccagtttgggggaggcagaatggatattacgccatttttaaatagagatctgaatattccgctttatcagcagctttatcggcattttaaggagaatatgcatcagggccgtattcctaaaggactgaagcttccttcaaaaaggcttttgtcgagtcagctttctgtcagtcagacaactgtagaacgggcctatgatcagcttgccgccgaaggctatattgtcagtaagccgagaagcggatggtttgccgattatgattcagaagctgtctatgtgaagaagaagccgggcgcttcacccgttcaaagaaagacggaggaagttccgcaatggattgatttccattacggcgctgtggatgccgtgcattttcctttttcggcatggcgcaaaagcatggtcacaagcttggatcaatatgggcatgagctgtatcggcccggggatgatttgggcgaggctgagctgagaacgatcatttcagagtatttatatcaatcgcgcggcgtgaattgccttcctgaacaagtcatagtaggcgccggaaaccctattcttctgcaaatgctgtgcaacgtatttgaatcgaatgtttccatcgggtatgaagatccgggttacccgagagcgagggagatttttgaagccaatcatatgaatatcacaccgatacccgttgatgaggaaggggtctgtattcggaagctgcaggaagagcggccgcgtctagtgtatgtcacgccttctcatcaatttacgttagggacgattatgccggtaaacagaaggattcagctgctgaaatgggcggcggaacaccaggcgtttattatagaagacgattatgacggtgaattcagatacaccggccggccgatcccttcattgcaagggcttgatcagcatcaccgtgtcatttatatggggacgttttctcaatccctgcttccctcgctgcgcatcagctatatgattcttcctttgccgcttatcgaaaaaggcagggaaatcgcttctttatataaacagaccgtctcctgccacagtcagctgacgctggcccaatttatcaaaagcggagagtggcagaaacatatcaacagaatgagaaagctgtaccggaaaaaaagagcggtattattagaggccgtgcggcgcgagctgggacaatacgtaaggattcgcggagaaaattccgggctgcggattttactggacgttcagctgcctttcagtgaaaaagagctgattgaaaaagcaaatgaacaaggggtcgtcatctatcccgtgtctcatacctatcaaaaacagctccctgcgaaaacagtttccctcgggttcgcgggagtttctgaaacggatatacaaaacggcataaaaaaactgagagccgcctgggcgctgtaaaaaaagattgctgaggacagcggcattcatgctgaactgtcctcagcagcaaacgtttatagaacgggcaggcggagcacagtatcaatattttgtaaattgagctggatttgttcgtttgtgttccacggatgataccaccctttttccatcatataggttgagatttgctcgtgcatgtcaagggcttcttctaagtgccgggtgaggatcgctttcacttccggcgttcctgcttccgtcgccgccatcgcatagtttctgactccgctttttgccgaattcaataaatccattgcgacaatttggtctgtcagtgcatccattcccgtcaggtattcaataatcggattcattcgtcattcatctcctcattcatgctgttgatcagataaaatcgaggcaaattcctgcaattgcctagtagatgtatccacatcctgctgcatgatttctttcagatgcggatcggataccagcgctttcatggttttggatttcgtcagacaaagtgatttaaaagacgtcatctcctgaatttcgagtaattcatgtaaggcgcgggccattttctgtagcctccgttctctaaggtttgagtacaacttttatgcaatcatctgttttcgtgtcaaacatctcatagccgtgtttcgcttcgctgagcggaatgacgtggcttacaacatcgcccggatcaatttttccggttgataccaattcaaacatatacggcatatagtggatgaccggagcttgtcctgagcggatattgacgttccgctgcatgatatcgccaaggggaaaaccgttatatctgccgccgtacacgcccgtaatctgaatcgttcctccttttcgcaccgcttgggaggcaatgaccaaagcgctcatagccccgccatgaagctttaatccgcttgcgaggaactccatgtctgtcatttttccgtccatgccgacggcgtcaatgacaacatccgcgccgcctttggtgatttctttcaggtagcttcccgtattttcgtggtcttcgaagttaacgatttccactttattcgtccgtttggcatgctggagacggtagttgacatagtctacagcgattacgcgtttagctccttttaaccagcagaatttttgagcgaacaggcccactggcccgcagccgagaacgataactgtatcgccttcttttacgccggcattgtcaacgctccaaaagccggttgtcatcgcatcggcaatcacactcaatttctcatcaggttcttcacacgtttcggggactttaaaatgggtaaagttcgcaaaagggacgcgtaaatattccgcctggccgcccggatagccgccggtactccctgaatagccgaaataagcgcccatatcgccgttatcatttgattgatcacactggctttccaggtgatttttgcaataagtgcattctccgcaggcgatattaaaaggtataatgacacggtcgccttttttgactttcgtcacgccggggccgacttcttccacgatgcccatcggttcatgcccgatgatgtagtcttcctgcaagttcgggatgagtccgtggattaaatgtaaatctgagccgcaaattgccgtacttgtgacttttataatcatgtcatcatgtttttcaattttcggatcaggcacgtctttgactacaacgtttttaactccttgatacgttacggccttcatgctgtaatacctccagtattagtgttcatcaggtgtacggtcaaacattccttttctgtttgtttcaacgggaaacaggttcatgtttccgaccatgagggtatttttcgctgaaagctgatccaatttatactgttcgctcagatcatgcgggtgaaaccactttttgctgaccatcaagtctgtaatctcctggtgcatcgcgattccttgcatgagctgtttgcgcagcaaagcccttacatcaggtgaagcggtttccgttaaagcgacggcggtatttctgacgccttctttggcgcgtatgagaaaatccattgcgaatgtcatatctgcgagttcagggacatgtaatgaattgattggatctaaatggtcatgattcaatggtgcttaccttcctttcagttgatgatcggtgtcggccggttttgaggaacaggagcctgaaaaggtgcacgttcataaaccgtctgcagatcagccagatcttgagaggcctgctgaacatctttttccattaacgttttcagatcctgatcaaacacaagcccttgcatgagcttggatttcgctacacaaagcgtcttgaagttaattatttcatgtaagtcgagcgactcatgagccgctaattcacgcttatccataatcgtctgtagcctccttttctagaaatacgcagttaattttccctgagaaaagggatctagtcttacaaattttgtttatcaggatcgaaaagtgccgcgcatcccggaaaaaggcaaaaaatccggtacaagccattcatgccggattaaaacataacggacctgtcgtgacagcggcggggctgattatgattttcgtcttcgcaggatttatctttgcgggggaagctacgatcaaatccatgggattggcaatggcattcggtgttcttttcgatgcgttcattgtaagaatgaccatcattccgagcgtcatgaagctgatgggacatgccgcttggtatttgccgaagcggctggataaaattatcccaaacgttgatatagaaggccataaactgacacaaggcaaaatgccggagaaaccgaaagaacagaattgaatataaaataaaaaagcagatcatcgtgatctgcttttttttatgtgccgactgcatccataaacagagaaaaaagctttttcatgtcttcatgtttctttgtcagcatttcaggatgccattgcacgccgacgacaaataactcacccgtccgttcaatcgcttcaatgactccgtctttcgcataagccgcggccttaaacgttgaagctgtctcttttatgatctggtgatggaatgaattcacacgcgctgaatcgccaaacaaggaatgaagacgggtccctttttcgaaagaaacatgatgggtttttaacggaggatctttttcttgatcatgcttgatctcagcaaacgaagcgtgtgacaggtcctgatataaagtgcccccgaaagtgacatttaacatatgcatcccgcggcagatcgccagaatcggcttctccatagcaatcgccgtttgaatgagctccttctcataggcgtcccgatcaggaaaggtctttctcaaagcctgtaaaggttcctcgccgtaaagcagcgggtctatatcctggccgccggacagaatgatgccgtcaacctgagagacctgttcctttaaaagctccgtctcttgaatcaccggcaaaataaacggcacgccgccggcttcggcagcagactgaatataatcattattgacatacgcccgattataacccgggaaaggaccggattgatcagccatgatgtttcccgtaattccaattcgtttggccattcttcgccctcctgaaccatgctcataataatctgaatgtaggttgtacaaatcagtttgaaattattcttttctatacgtaaactttccaaaaaaaaacccgtgagaatcacgggttttttgtactcatttcaatttcttgatctcttccgtcagctctttgaatttttgatcaagctcagaatattgtttatcagccggagtcatgaagctgagctttccaagcacttcctgccgttcggtttcgagctttaatcgtaattcttcaatatcatctctggcggcgggggattctttccattgttttcggacgctgccgtttgagatatcaagccggatgtccgttgttttttcgagaaagtaacgatcgtgcgatacgatgatgagcgttccgtcgtattgagccaatgtgtcttcaagctgctcgcgtgacggcaggtcaaggtggttggtcggctcatcgagaatcagcacatctttttcctccagaataaatgccatcagcttgcatttgacccgctctcccatgctcatcttgccgataggctccgtccattgcgctgcggtaaatcctaaatgcttcatgagggcttgcacatttccccttgcttcgaacgtttctttgtaaaaaagctgttcgggggttttgtcaagcggaaggtcaaatacttcctgcgttaaatacccgacatttgcagacggagacatccatatgctgccgccctgagctttttcctgaccgaggatgaccttcaataatgttgttttcccgctgccgttcgggcctgtaatggcaatcttttcaccgtgcaaaacagtgaaattcacatttttgaacagcgttcggccgtcatacgattttgtgacatcacttacttctaaaaaacgctttcccgcttttttgcggtgttcaatggaaaagcggacttcatactcagcctcaaccggttctgctttcgctttttcaagctctttttcaagacgcttctgctttgatttaatctgcgcgtccgtacgttttgcttttacgcggtggtattctttaaagccttctattttcgttgattgggcgtgggctttttttgaccaggcgttcagctcgttcatttgagcttcaatccgtgcgatcatattctgctgattctcataattccgctgctgtgtcagtcttctctgtttgcggacttccatatagcttgaataattccctttatgctcaatgagtttctttccttcgatggcccagatttttgtcgccgctgcatccaaaaaagcacggtcgtgggaaaccaaaataatggtgcctttatagttcttgatctgattttgcaggatttctaaactgtgctgatcaaggtgattcgtcggctcatctaataacaaaaggccgcttgaggaggagaaccctttggcaagacgggctttcagtttttctccgccgcttaattgggaaaaggctcgggcgggcacgttccatttttctaataatgctgcctccgcaggctccggcaggccggaatcataagcttccgtttcttgttcgaccatatagatgttcacatcttgcatcatctggatctgtccttgtgacggtgctgtttgattgcagatcaattgcagcaataaagatttgccggcgccgtttttgccgatgacaccgataatctctccctgctgaacactcgcgctgatctgttcaaaaaggggaacactgttgatttcataactgattccggttaattttaatatttctttcatatgtcaatccctcgctttaagggaggacaaaaaaatcctcccaattgatttggaaggattagccgtacctgtgcatgatcaaataagctatttttacatagcttttgtatcgtatagaaaatgggcagactaatcctattttttctgatttgaaatatttgatttcaaacggtcaaaataagattagttaatcattgtccacccatcgtcccttcgtatttgttacaaacagtgtagcacacacttacctgtaaaagcaaaaggtataagcctttttattccaggtttgaggcttcccactcttcttctaaaacggcataataatattcatcccaccagtcattatcatgggggatgcattttttgaaaaagccttcccgccgcattccgatcttttccatcacccgatgcgaggcagtgttttccggttggcatgtcgcaatgatccggtgtaatttcatcgttttaaacccgaatcccagcaaggcgcttgcagcctctgaagcatatcctttgccctgataatcagggtgaaacacccatccgatttcatacgtatggtcaccaaaatacttaaaaaaagcaatgtggccaatgaccgttttttcatccttcaatacaacagggaacatctcggcatgttcaccgctgttatcaataacgaatttcttggcatcttcttcggtaaagacaccctccggtatatacttcatgacattcagatttgaggtgtactcatagacatctttccaatcttccggttcaaatgtccggatcacgagcctgtcggttttgatattcatattatgttctcccatcaaaaaagatttcatttattacttcaatcaaaaagtgtaaaaacctttgagaggggaagggacgaatataaaaaagcctgcagatatacactgcaggcggttatttctcattcgcggcggcgggcaggtttgtaaagccgaattgccctccgacagcttcttttacttcatgaataacgataaatgatttcggatcaattttttgaacatgttttttgattttcagtaattcgttctttttaatgacgacatatataatgcgcttgtctttgctgccgtaatacccgtatccgtaaaaaatcgttgccgcgttgccgtatacggaggtgatcgctttggcgatttcttcgtattggtcagacataatggtgagggcttttttattatggaaaccctcaatgacaatatcgacgattttggcgcacagataaacgaatataaacgtatacagcgtatgattgatgccgatcgctaaaacggatgcgacaataatgacacaatccatataaaacatgcttttggagatgttaaaaccctttgtgtaatttaataaatacgctaaaagcgtggtcccgccggtagatccgtcagcgataaagattaaagccagccccgctcccatcagcagagcgccgaacacgatcccgagcaccatgtcatgaaccccgaacggaataaagctgacgatgctgagaaaaacagaagtcatccccgtaccgagtatcgtgtataaaatcgtttttttcgttagaaatttataagccagtccgataaaaatcaaatttacaaccagtgttgtaatactcgcaggtatatggaaaagataatataaaacaagagcgattcccacggtgctgccgtcccctaagtgattcgggatgacgaaaaattccacggacgccgcgataagaaaggccccggccataatcatcagtatatccttgcaaatgttcttcatgtgtagacctcctttgcagtcaaaaatatataaaaaacaaaaacgcctcaaaaattatccagcagaactaaataatttttaagacgaatcattcacaatctcgtttgttcattcagtaaagaatgatcagcttcaatatcgaagattatatagacaccttcacatcttgtcaatgctgtgaaaattgatttttctattatgtaaatgaggtttgaatcaaataaaaaagaggaattatatcagaagagttttcatttctgctctatcattaagagaaatgtatggaagacatcaaagaagggatgatgacattggaacgaatttttatcagtccggccaaatatgtgcaaggaaaaaacgcaattgaaacaatcggcggacatctggagggcgttggtgaaaaagccgtcgtcattgccgacaaaaccgtatgggatatcgctggtcacaaagtgacggctgaattaaagaaaagcaatatctcctctgaagaggcggttttcaacggagaagcttcccaggaagaaatgaaaagaattgcgggcattgcagaaaaagcgggtgcgtccattgtgatcggagtcggcggcggtaaaacgcttgatacggccaaagccgtatcagatgaaataaacggctacacggttatcgtgccgacggccgcttcaacggatgctccgacaagcggactgtctgtcgtttattcagaacaaggcgcgtttgaaaactatcgtttctaccataagaatcctgacctggttctggtcgatacgaaaatcgtcgcggaagccccgccgcgttttttagcatcaggtattgccgatgcgatggcgacgtgggtagaggcgcgcagtgtcatcgccaatggcggtaaaacgatggcgggcggaattcctacaatcgcaggagaagccatcgcggaaaaatgtgaagaagtactattcaaatatggccatctcgcctatgaatccgtaaaagcgaaagtcgtcactcctccattggaagcggtggttgaagccaatacacttctgagcggactgggatttgaaagcggcggcttggctgcggcgcatgccattcacaacggcttcaccgcgcttgaaggtgagatccatcacttgactcacggtgaaaaagtggcattcggcacgctcgttcaactggcgctggaaaaacgttcgcttgaagaaattgagcggtatatcgcgttttatatcagcttggggctgcctgtcacacttgaagacatcaaattgaaagacgcatctaaagaggacattatgaaagtggcagaagccgcaaccattgaagaagaaacgatacatgccgcttttgatgtcacggctgatgacgtggcagatgccattatagcggccgaccaatacgcaaaagcgtttaaagaaaagcatgcgtaaaacgtttcaccgcaagatcggagaccaagggctgttatggcccttggtttttttatgtcttcctgccgcccttgaaaactttaaaaaataaagaaaaaattatgatacaatatacaaatgttttgagagattgacaaaggaaaggtgggaacgatatgctgcataatccgaccggcaaggagcggcttgcgctggcttttcttctcggcatgcttgcgatactggggcctctgaatatagatatgtatctgccgagtttccctgaaatcgccgaagatttaagcgcccgcgcttcgcttgtccagctcagtttaaccgcatgtctgatcggcttgacaatcggacaggttgttgtcggcccgttaagtgacgcgcagggaagaagaaaaccgttattactatgtatttttttatttgccttgttttctctgttttgcgcgcttgcgccgaacattacaacattagtgattgcccgttttcttcaagggttcaccgcttcggcaggactcgttctgtcccgtgcgatcgtcagagatgtctttacggggagagagctttctaaatttttctcgctgttaatggtcattaccgccgtcgcgccgatggtggcgccaatgacgggaggcgcgattttactgctcccgtttgcatcatggcatacgatttttctctttttaaccgttatcgggtttttgcttgttctcatcattgcgctcaagctgaaagaaaccctgccgccagaaaagcgtatcccgagctctatcggaaattccgtgcggacaatgggaagcctgctgaaagatcggtcatttatcggctatgcgttgacggtcggttttatccacggcgggagctttgcgtatgtctcggggacgccttttgtgtatcaggatatttacggagtatcgcctcaggtctttagtgttttattcggcataaacgggctggcgatcattacaggaagctttatcatcgggcgtttcggcggaatcattcatgaaaaaagcctgctgaggattggtgtcattacagcgatgacggcgacagccgttctgcttgtcatgacgatcattcacgggccgctggcggcactggtgatttccatttttatttatatgattacgatcggcatgacgctgacaagcacctttacactggcgatggaaaagcagggacaccgcgcgggaagcgcaagcgcactgctcggcatgcttccgcttcttctcggttccatcgtgtcgccgcttgtgggaatgaatgaagcgacggccgtgccgatggggctgatcatgtttgcgacatccgttatcggttccatcgcttttttcaccttaacaacaaaacaggagaaagcaaaaaaggagtgaaatgattcactcctttttttatgcccgctattcatatttcttcaggatgatcgctgagttatgtccgccaaagccgaatgaattggagaggccgattgttaaagattgctgacgcggaccgtctgatacatagtccaaatcacacgccgaatcaggggtttgcagattgatcgtcggcgggatgatgccgtgtctcaagctttctgtcagagcgatggcttcaactccgcctgccgcgccaagcatatggccgagcattgacttgtttgccgtgaccggaatgtcataggcaagctccccgaataatttcttgattgccaatgtttcagaaagatctccggctttagtgcttgtcgcatgggcgcttacgacatcaatgtcttccgctgaaaccttcgcctttttcaaagcgtttttcatcgccaagtatgcgcccgttccttcaggatgggtggctaccatgtgatacgcgtccgagcttgcgccgtagccgagcacctcacagaggatcggagcatttcggctgattgcgttatccaatgattctaatactacaatacccgcgccttcactcatgacaaaaccatcgcgatccgcgtcaaacggccggcttgccgcggcggggtcttcatttctcgctgacagcgcgtgggcattgccgaagctggctaatgacaggtttgtaatcgccgcctccgcaccccctgcaaacatgatatctgcgtcatcattccgaatggcgttaaatgcttccccgatcgacgtattgccgatagaacacgcggtgacgggagaaagtgagggaccgagcgcgcctaatctgatactgatttgagcggcggccgcatttgaaatcatcatagggacaaggctcgggctcacttttcgcgctccccgttcgtttaacgtacggacattgtcaatcaaggtcgtgatgccgccgattccggagccgacgtacacgccgaggcgttcacggtcaatttgctcgagctgaatcccggagctttccagcgcctgttccgctgcggctaaagcaaactggctgaaacggtcaagctttctcgcttcttttctgccccatctttcttctgcgtcgaaatcgcggacggtgccggctatttttgtcttggagccggagacatcaaacgaatctatgatagagattcctgattttccttccgtcaggtgtttccaaaatgtatgcacatcattgccgagaggtgaaatcactcccattccggtgatcacaactcttttcatggtcattcctccttcggtatgtatttattgtaactcgcaattatcctattacaagttgttgattatcctagtataataagtaccagggtaagaaaggagagggtcagaatgataccagaagcaagattgcaggctctttctgagtttttaaaaacgcagcgggccaaaatttctccgcagatggccgggctgccaatgggcacacggagaagaacgccgggcctcagaagagaagaagtcgcgcaattagccggcgtaagcaccacgtggtatacgtggctggagcagggcagagacattaaagtgtcagcagccgtattggacgccgtttccgatgcgcttcagctgaataaagatgagagaaattatttgtacgcgcttgccattgatgagggcgtgaagcagccgtttacagcggaggaagaagcggtcatcagcccgtccctttcaaaaatcctccaggagctccgttattgtcccaccattatctcggacaggcggtgccatatcgtagggtggaaccaggcggcggctcacgtgtttttggattttgaacaaattcctcctgaaaagcggaatctcatagagctattgttttccagaaaagaattaagaagtctagccgtgaactgggagcattttgtgaaagggttcatcgccattttcagaacgtattacggccagtatgtcgcggatacgtggtattctcagtttatagaagaaatggagcagacatattcagagtttcatacgctgtggaatgagagcgaagtcagctcggctcccgaagtattaattgagttccgccacgcgaaggcgggaaaaatggtttttaacctgacttcctttcaggttcagggcaacagtgacctgcgctgcagcgtgtatacgccggtagatcacaccgaaacggaggcaaagctgaaaaagctctgcgaaaaccggtaaagaacagaaaaaaacgggaggcggctgccttccgtttcagtttaaaataaaagcatcagaccggcgatggccggtgttaaaaagatggctgatttcagaatgactttcggcacgagattggtgaatttcgctccgacatacgcgccgcacatcgttccgatcagcactttgaccaacagcatataatcgacaaatccttccgtcacataaccgagtcctccgccgactgcaagcgggataatgacaagcatggtggtgccgaccgactggcggatggataagcgcaaaagaatcattaagccgatttggatgaagggggcagaaccgatgccgaacgttccggacaagatccctgcgatgataccgagcacaacggctttcacccatatgttcaggttgctttgccgtccggagtcttcttgtgtttcttttaaaataaataaccggaccaaaataagcagagcagataaaaacagcatgcccgccgtcaagtaatgcagcaaatctgcgggaataagagaagtaagtctggctccgaaaaacgaaccgaatgccgcaaaaacgccgacgatgagaccgattttcatctgaatattgccttcacggtagtggctgaaagcccccgataaacttgtgaaagccattccggcaagggaagtgcccaaagccgtatgaattggtacgtgaaaaagtatggttaaaagcgcaatgacaaaaccggctccccccgcgccgataaacccgagaataatcccgagaagaaacataacgagtataataagcacaatcttctcctccatttagatgcctgatcacaatattccgatccgctgtatcaggttttaacaatcgacattggtcgtccgtcgaccgtcgttcaatacttttatgttacctcaaatttaaggtattggcaagaagacgaatggcttttatacagagagtctacagctctttgaccatcactttttccccgttgaagtccagctctccattgaatataaagctgaatctttgataaaggcgcaatgcgtgcacgttatcttcaaacagacttaaataaatccgtctgcaatcatataatcgagcgaggtgccggataagggcatcaagcatcagtttgcccaaaccgcgtccctgatatcgttcatcaatgaaaaaacggtcaagccacactctgccgttttggttttcctcatcatattccggaaaccatccgtacatggcaaagccgaccaattctccgttaaaataaaggccggccggctgataatgccggcaatcctcagcatcttgtaaacacttttccacggtttcaataaatgaagtctggctttcgcttacatgaagcgccagtatatcagcacggttttcttccgtgactgctttgatttcaatagtcatacttaatactcctcttccgctttttctgagacggttaaaagcttcgattgccgtaagcgtccgtccataggtaagctgatttgtgagtcagccttctctcagatacaatgaacatcataaaggatatggttaccgtatagtcaaggaggtattatgagcgaagacgtcagaaaatactttacaacgggtgaatttgcaaaactctgccacgtaaaaaaacaaaccctgttccattatgacgagatcggcctgctctctccggaaatcaaaaaagcgaacggatacagatattattcctatcatcaattcgagctgtttcaggtcatcagtctgtttaaggaggtcggcatacccttaaagcgtatcaaaccgctcttaacagacaaaacccccgaggatatcatcgcgcttttaaaggagaaatcctcagaaatcgaaagcaaaatcaaaaagctcgaacacctgcaaaggatgattcagacaaaggtgaaactgaccgaacaggccttggagacggacttttcctccgtctctctgcagcactcagatgaagaaccgcttatgatcgggcgtcctgtactcaatttgcctgaacggcaatacaccgccgctctttccgaattgatccgctataggcaaatccatgaactcgatcaggggcacccggtcggcggcctgtttgcgcgggagcagattctgaagaaagaattctacaactacactcatttttatatcaagacagaagaaggcatagtgaataaagacctccatatcaagccgaaagggctttatgcggtcgggtatcaaataggagatgaagcggaagcggcttaccgcagaatcatgcagttcattgaagagtatgggctggaaatgggggattatgcatatgaagaatacatgctcgatgaagttgtggcggatgggtttgacaatcaaatcacaagaattcagctgcaagtccgcggcacataaagctgatcatttacgccttttaacaaaccttgtataatgagaaaaatcagattggaaattgaggtgaaaagcgatatgtttttggcgcctttatttgaacatgatgtaccggcagcacttctccgcccttaatggaggaaagtgactgcgcttctctccgttagggcatgtcacatgacctaatatgataacggagggtgcatcaaattgaaaaatacgttgttcggttcgatttatttggcattggccgccagtatctggggcggtatgtatgtcgttgtaaaagttgtggtagcggtcattccgccgcttgaactggtatggctgagatatgcggtcgcgcttgtggcgcttttacttctcagtttgtttacacgtcaatcctggaaagttcataaacgtgatctattactgattgctgtgatcgggttgatcggcaacacgatttcgatcgtcacgcaggagatcggcacgaaattatcaaccgcgcaaatgggagcgatcattacggcatccactcccgcatttatggttgtatttgcccgtctgattctgaaagaacggttaacgctgaaaaaaggaatatcggtaggactggcgaccatcggggtattgctcatcgtagggaacggagatatcaatatgtcgggccagctcggcggtctctcgcttctggctgcggcgctgacatgggctttgatgtccgtgctgattaaacgggttcccggccgttactcaccgcttgtcgtcacaacctattccatttgtgtcgcatttgtcatcctgaccccgtttacagcgggcccgcttcaggagattccgttgtctcagcttgcccggcctgagatatggggcggccttttatatctgggtgtgatttcaacggcctgtgcgttcatgctgtggaatcgcggattgcaattgctgaatgcggcaagcggaggtctgtttttcttctttcagccgctctccgggacattgctcggctggctgctgctgggggagaagatcggaggaaccttctggatcggggcggctcttattgctgcaggcgtcgtgctcgttattaaagaaaaatagtgtctgaaaaaaagccattcattgcagaatggcttttttctgatgtaatggcaggattcgtcccgccatgcacagaaaaaaagaagcagaaacggatcatgagcacggtactcttaaagtcaatacccgggtcctcgggagtccgtcaatcaaagtaaggcggtgaaaataatggagccaaaatggcttgaatgggcaaaacagcttcaatccgcggcgcaagcggggctggcatattccaaagacatatatgatattgagaggtttgaagaaataagaaaaataagcgtggatatcatggcgcattataccggcatcgagaaacggatcataaaagacgtattcgccggtgatacgggctatcccactccgaaagtcgatatcagagcggcagtttttaaagatcagagcatattaatggtgaaagagaaaagcgacggcaaatgggcgctgccgggcggatgggctgatatcggaatctctcctggcgaagccgctgtcaaagaagtaaaagaagaatcgggaatcgacgtaaagccggtgaaattattagctgtcatggataagaaatgccattcccatccgccatccgccgcccacgtttacaaagtgtttatcaaatgtgagatcatcggcggacagctcagggagggaacggaaaccagcgcggccgctttttttgcggaaacggagctgccgccgctatctgccgcccgcaatacagaaagtcagattgaaaggatgtttgcatatctcaagcatccggatgagcccgtttattttgattgaggctgccagcaggaaaaagagggggctggttcagaaccatttcacttatgaatgatccggcctgtgatagagaagataaatcctcaggccgggttttaagagtgtgcctgtttcggtgtggtgcgccccttaaaaaaccgtttttgaaaaatcaataatcctgcgggcagtttctgtcggtttttcctcggggacataatggccgcagccttttacctcatatccgctgacttcacgtattgattctctccatgtgtcaagcacgggaagaccggctaaattccctttttctccccacagcaaaagtgtgggaacctccagttttttttgtgattccttttctgaacgatatctcggcaaatcaatttgataagcggctctgtagtcattaagcgcagcctggacagcgccgggctgcttccaggcggctaagtaccggtcccaggcgccgtctgatgtcagcaggtcaaaaagcccgtcacctctgcttaataaaaatctaagatattcctcttcttttccttttattaattcttccggcagatggggaacgacttgaaatgtccagtgccagtatttttttgccgcttcagctgccgtcagagaatcatagacgtattcagtcggcataatgtcaatgagcacaaggcctgccgccagctccggagcatctaaagccagccgccttgctacccttgcgcctctgtcatgcccggcaattaacgctctttgtatacgcaggcggcgcatcagaccttgtatatcgcttgccatcgatttgttatcataaccgtttatgccgctcggcttttcagaatcgccgtagcccctcagatcaacagcgatgactctatgagaagcggcaagcgtcggaattacataacgccacgtcacccagctttgcggaaagccgtgcaggaggatgacggggggagcatcctcctttcccgcaaagacataatgaaggctgatgccatttacctcaactgaatcatgggtcacatgcttttcaaattgttcacgaaaagaatccattttctctctcctcataaaattttatttttttatttgagaaataatagcggaggtgacgtcttccgttgaatgctttccgccgacatcaggggtcaggacgccgctgtttgtgacggtttcaattgattgtaagaggagattgcccagttcctcttctccgaatgaatcgagcattaattttgccgtccatatttgccctataggattggcaattcctttcccgacaatatccggagcggagccgtgaacaggctcaaacatagaaggatattttccgtttacattgatattggccgcaggagcgattccgacgcttcccataatcgccgcgccgatatctgtcagcacatctccgaacagatttgaagcgacaatgacatcaaagcgttccggatgagtgacaaaaaaggccgccagtgcatcgatgtgctgcgaatctgtcttaatcccggcgtaatcccggctgacctctttaaagatgtcgtcccagaacggcatagagtgtacaataccgttagatttcgtcgcgcttgtgacgtgtttccgccgatttgccgccagttcaaaggcataccgcatcactctttccgttcctctgcgggaaaagaccgcgttttgaatggcgatttcgtcttcatcctgatagattctgccgccgacagagctgtattcgccctcactgttttcgcggacgactaacagatcaaaatccttcgggttcacgagaggggaggtgattcccggcagcagcttggccggccgtacattaatcacctgttcaaattcccggcgtatcttgatgagcagcccccacagcgaaacatggtcggggacgagtttttgatttcccaccgctcccaaaaacaaagcatcaaagtgttgtaacgtttctaatccatcatccggcatcatggttccgtgctccagataatactcgcagctccacggaaaagaagtaaaatcaaatgcaatgcccccatgtaattcggcgatcgcattcaatacccgctccgcttgcaggactacttcttttcccacgccgtctcccggtatgctggcaatcttgtatgttttcatgtttccatcacctctgaatgaattgtttcggtttacggaagaccgtcgaccgtcgtttgtaataattccatattacgccacttttgctgggctgacaagcttgggaatgttgcttccatagataaactgttatatgatcttggtaacataaggcctaaattgtatgaagaggtaggaaagatggataattttaaattagataagccaaccccgtattatctgcaattttattctcaattgaaaaaaatgatattcgacggggtgtttaaaccgggagaacggctgaatgaaacacagctggccaaggattttggagtcagccgatcaccgatcagagaagccatgcggctccttgaaaaggacgggctgctgacggcagacgatcgaaacggctttgtcatctattcgctgtccattaaggatgtcgaagagatttacaaaatcagaatatcgcttgaatcactggcggtcgaactcgtcattgatgaagcggctgagagcgaaattgaacgtattgaacagcagctacgggagacggaagaagccattcataaaggcgccaaagagactgagattatttccttgaacgaaacgtttcatcagctccttgtggatttcagccgcaacagccagctggccaagctgcttgagcatgtcaatgtgctgattcatttttgcagagttcttaattttaaaggagatgaccgtgcggaggttatcctgcatgagcaccggaaagtctttgaagaaataaaaaaaggcgacaaagcaaaagccgtgcaatatatgaccgagcatctccagcatgatgtagaacatctgaaaggcgtgctgaaagcggaagaaacagacgaatcgtcacgattgacaaggtgaaaagccttgtctttttttgttggtgtcattaaatcgccataaagacccgacggatgttccttgcatgatttttttcgcatcatttatgatggatatggaaaaagggcgaaaaggcaaaggagtttgaaaaaatggctaaacatattctaatgatcaattttcccgcagaaggacacgtaaatccgactctgggtgtgacaaaggccttcagtgaacggggcgatcacgttcattatatctcaacggaaaaatacaaaagcaggctggaaggagtaggggcggaggtccatcttcaccgcgatctgctcagaatgacacccattgatcccggcaccccggccggtatacttgcatttttaaaggttcatatcaaaacgtcactggagattttacagattgtgcagcgtctggctgaggacattcaattcgacgccgtctattatgataaattcggtgcgggagagctggtgagagattatctcaacatccccggcatctcttcttcagcatccttcctgttcaatgaagaccgtctgaaaatactgccgctccatccggaatcaggcgtgccgtttaagccggacagggaatgtgaagagctgttggccgagatgaaagacaaatacggcgttgctcctgacagcctggttcagtttatgaacaacacgggtgaactgaacgtcgtctatacaagcagatattttcagcccgaaagcgagacattcggagatgagtatttatttatcggtccgagttttccgaagagaaaaggggacaccgccttcccgattgactctttaaagaatgaaaaagtcatttatatctcaatgggaacggtgctcgggaacacggaagcgttttttaatctgtgcatagacgcgttctcagattttgaaggcaaggttgtcattgccgccggggaaaaagccgatctgtcgaaaatcaaacaggcgcccgaaaactttatcatcgctccatacgtgccgcagcttgaagtgctggagcaggcagacgtgtttgttacacatggcggaatgaacagtgtaaatgaaggcattcattatcaagtgccgctggtcgtcatcccgcacgataaagatcagccgatggttgcgggccggctgactgaattgaatgcgggctttacagtgcaaaaagatgaagtaagcgctgaaaagttaaagcttgccgcagaagaagtccttcacaacgggaaatacaaacaaggcattcaagccatcaatgaaagctttaaagaatgcatggacatgaaggatgttctggcacggatcgaccggtttattgaaacgaaaaatgctcattaaaatgaaaaaaagcctgtttccgcctccaaaggggaaacaggctttttataatggctttcagatgatatgatgctcttcatttgcaagtttcaccgccggtttggcggatgagccaattcatattttgttcatattttattaaaagtttatccaagcctgtcctttacagtgaatataatcacaaatacgctgctgaaaggggcttttaaaaatgcatattcatatgatcaacaaaaaccagtttgagagtgacttggaggcggccgggttcagccgtcaggcagatgatattatcgggaaaatgaaagagtacgtaatggaatatgcggcttcatccgaacggttcctgattgaaacacaaaccgtcatgaacgaatacaaagctgtcgtctgtgcgatgttttcaaccatggaaattgccggggcaaagaaagacgagaagcatgttgaattcgaagcctgcactgtatggtgtgaataaaagaatcacattaaaaaggaaaaatattgaaacctataaagcaggtatccgtataaaagagagaatcagtttttagaagggaggacgcgaatgaacgataagaaaaaacaagcttttgaacagcttttcagcacattagacggaagacatgaaataaacggagctgtattagcagcagaaaacggccgcattttatatcagggttcattcggaactgcagaactggaaacaaacaggatgctgaatgaccaatcggtctttgaattggcttcagtatcgaagccgtttacagctctgggtgtcatcattttagagcaagaagggaagttgcgctatgacgatatgatagagcggtggcttcctgattttccttacccgggcattaccattcggcatttacttcatcatacgtcagggttgccggactatatagagttgttcttaaaacattgggatcggaacaaaattgccgttaatcaagatgttatgaatatgctcaaacggcataagccggatgtttatttcccgccgaataaaggctggctttacagtaatacggggtatgttgtgttagcggttattattgaaattgtatcaggcatgagttttgctgaatttatgaaacaagccgtatttcatccccttcgtatgcacgatacgcggatttataacagaagattgagcaaagaaaccattccgaactatgcatatggctatgtctatgatgttcattccggagagtatgtgctgccggatgaacttgaggaaaccgattatgtcgtctttcttgacgggattcaaggcgacggaaccgttaactctgccataaaggatttatatctgtttgatcaggctctttatacggaagaaattatcagcaaggaatctaaagatcaagcgtttacacccggctattggaatgaagaagagcaattcggatatggttttggctggatgatccgaaacagcagcgaaaaagggaagatgatcagccacgacggaggctggccgggatattccagtctgatgcttcgatatattgatcagaataaaactctgatttatctcagcaacatggaacaatcggatcaatttgaacaagttgtgatcgaagcggcggtaaacatcttatttgatcagccatatgtgattccgaaacgtccggcggatcagaaaaaagcagacatcgaccccgccgtttacagcagatttatcggtaattattcatttcaggatggtacctatgcagcggtgacggtaagagaaaaccgattgtatattacaatagacggacaaacaccattcgaattattcccaatgacagaaacccgttattttgtcagggcgctgccgattgaaattgaatttgcaggtgataaagcacaaacagcctcacatttcgttttatatcaggacgccacagaagaaacagctctgcgaatagactgagtgacatacagaaaaaccgccgtcctgagaagacggcggtaacagaaaagtcaaacccctttgattatgcgaaattttattttcggctctgacataaatatagaagaaaaaatcatagctccgagcattgtgatgtattccatataaagtgaaacctctgccaaaagcaaacccgcaatcattaaaacagcgcccaataccaccgcaaaaaccttcgttttcatgatgagttccccctattatctgataattgaattatactgcatttctattaatgtgtacattttgtgaacaatttcacctgacgaaaggcaataaagagagatttgaagaattaggagaaatgacaggccgcaattcatcttttgttttactgaggaaccgaaagggaaacgcaaaactatcaaaaaagcaaaggagttaattgaaatgaaagcgcgactatttttattcagcatgtttctcctgattcccgttctggcgcttgccggatgcaacagccaatcttcaggaggaagcgaaaaagcgaaagacaaagaaacgcactcacacgaagacatgaatcactcaggttcatctgaggtgccgaagggtttaaagaaggccgaaaatccgacttataaagtgggcagtgacgtcatgattttagcttctcatatgaaaggcatgaaaaatgcgcaagggaccgtaaaaggtgcttatgatacaacggtttacagtgtatcttacactccggaaaccggaggaaagcgcgttgaagatcataaatgggtcatccaggaagaattgaagggcgctggcgataaaacgttaaatccgggtgacaaggcagtcatcgaggcagcccatatgaaaggcatgaagggtgctgaagccgtcattgattcagccaaaaagacaaccgtttacatggtcgactatacaccaactgatgggggcaaaaaagtaaccaaccataaatgggtgacagaagacgagcttactgccgcaaaataaaaaagaacgcaaaagccgaaggaattcctttggcttttttgcggtctcacacttatgcggattttcttttcaaagcgggtctcgttaaagagaatacggctaagctgactgcgataatgacaatcaaaccgccgcaccaggcggttgctgtgacagaacccgtttgtccgatcacgccgccgccgatggctgacccgagcgcaatgccgatttgcaaagcggacgtattgaagctttgctgaatatcggaagactcaggcgcgattttgatcaaatagctttgctgcgccggcgcaaggctccagctgagcaatccccaaatgaccatcgcaggcaggaaaacgattaaagaaaccgttgacagcggaaggataaacaggatcaaagcgaaagaaacggtcacaagcatgatgcttttaaatgatcctaaacggtcatacagccagcctccgaacgggccgccgcataccgctgacaggccgaacaaaaagtagcatacactgacccaaacagaactcaaatgaagcgttgtttccaaaaaaggcgcaaagtaggcatatagtgtgtaatgccccgccaatgtaaataaggtaacaagatgcgcgctggcaatcttggcgttcccaatcgttttaatctgctcacggaacgggatcattttttcagcaggtattttttcaaaaaagacgctgataatcagcatggaaaccagagataatacgccgattcccaaaaacagcacgcgccatccgaaggcattgctgatgataatgccgacaggcacgcctaaagcgattgcggagctgaagcccatgaaaatgatgccgatcgcccgcgctctgtattccggcgccacgattttaggagcaatcgttaaagaaaggacgacaatcagccctgtgctcatggaagcgagcactcgtgacaccataagtacggcgaaattgggactgaagtaagcgaccagattactcaggaagaaaacaaaaagtgcgattaaataaagccgctttcgttcagcttttgccgtcactgccaaaagcagagggcctgataccgcgtaaccgagcgcgaacacgctgatcagctgcccggcgctgacgatcgatatgtctaagtcggaagcgatttgcgggagaataccgcccacaattaattcaaccaatccgactgcaatagtagatgctgcaagcagaaatactttgaaattcatgtacagatactcctttttttattttttagaaaataaaaaatcctgattacaaaaagtgtgcgggacagttttttgtaatcaggattttacggttcctggtagacaccctcaaaccatatcattgaggttatacaatgtatgcaatattcgtttgtgtccgtttctgcaaaaaattctaccataatagtgagagagattccatagaaaattcgaggaaatcctttcaattttaataacggcggctgtaacgtcattgatgaagcagggaaaaaaatttatgataaccgtaaggagtctatacagatcaaacattacacagccggaggaaaccgatgaataagtacgaaaaaatcgccaacgaaatgagaacgaggattaaaagcagtgtttatgacatagatcagccgatcccggatgaaaagacgctcgcactggaattcgggtgcagccgaatgacgatgaaacgggcgctcgacacgcttgcggctgaagggatgcttttcagaaaaagagggcacggcacgtttattattcaatcagccatgcaggacgagcacgttcacgtagtcagcaacgaaattctcggcttgagcaatttgttaaaaggcaaagacgtcaaaagcaaggtcatccggtttgaagtgcagttcccgtctcaagatgtcgccgcgcatttggccatcgacgaaaagactcccgtctattatgtagtgaggctgagaatcgtcgaaggcgaaccgtacgttcttgaaaaaacgtacatgccggcgagccttatacccggcattaacgacgaggtgctcaaccattccatctacgatcatattacgcaagagctgcagctcaaaatcgcaggcacacacagaaaaatcagagcgtgcaagtcggatgatatggatcagcaatatctcggctgccgggcggatgacccgatactggaagtcgagcatgtaggctttttggataacggcaccccctttgaatattcattttcccgccaccgccatgacaagtttgtcgtgacctcagttaatataaaacgttcgtaaaagcgccgaagagtgagagaaaaaactcactctttttttcgttgcgcctgatttacaccttcgccgattttatgttatattatccaatgatagaatcatcctacaaattacagaggtgttttgatggatatatccaaaacaagcagactgtcgctcgtagaacaagtggtggcgcaaattgaatcgttaattcaatcggataaatggccggtcgggacgcgcattccccctgaactggatttaatgaagcaatttgatgtgagccgaaacacgctgcgtgaggccatccgggcgctcgtacatgccggcctgcttcagacaaggcaggggagcggtacgtatgtcagctcatccagtgtcctcggcgcggcattttaccgtcacataaaaaaatcaaatttgcttgaaacattagaagtcagatacgcacttgaaagagaagccgcacgattggcggcccaaaggcgtactgatgaagacttggaggcactgaaggcatgtctggatgaatgtgaagcggccttgcaaaacgacgatcgaaaacggtatgccgaagccgacattaagctgcacaaaacaattgtacaggcggcccataacaatatgctttctgatctatacgaacatatgacggaggcgctttgtgcgtcagtccataacctgttggaaatcacccctgatatcagggtccacagccagcttgccgatgcgattgccggacagaaaccggatcaggccatggaggctgtcaatcaatacatcacaggatttaaagatacaatacacatggaggataaacatgaaaattgaagacgaacatcaaatgttacaagcaagtcagcgtaagaaactgatcttgctgatcatcggagtcatattgataggggccaatctcagagcgcctctgacatcggtcggaccgctggtttcctcaattcgggacagcctcggaatgaccaatgcggctgccggcaccattaccacagtgccgctcttggcctttgcatgtctgtcgccgtttgttcctttattgtcccggcgcttcggaaccgaacttgtcttactgtcatcattaattatcctgacagccggtatcctgctgcgctcaatcgccgggatcggcactctctttttagggacgatcctgctgggattatcgattgccgtatgcaacgtactgctgccgagtctcattaaacataagtttccgggaaatttaggcgttatgaccggcgtctactcggtttctatgaatctatgcggcgcgattgcatccggcatcagcgtaccgatcgcctcctcagctggattgggctggaaaggcgcgctcggctgctggggcattctttctttaatagcgttcgtcatgtggattccgcaaatgaggggacgcgaactgcccgtccgcacgccgggggcagacggagggaagaaaagcagtctgctgcggtccccgctggcttggaaggtgacgatgtttatgggcctgcaatcccttattttttacacagtcatcgcttggctgccggaaattcttcagcagaatggactcagctcaagcagggcgggatggatgctttcgttaatgcagttctcactcctgccgattacctttatcgtgccgatcgctgccgctaaaatgaaaaatcagcgcgctctcgccggactgacggccttatttttcttcatcggcattgccggtgttctttgcgggagcccgtctcttactccgctatgggtcattttgatcggaattgcgggaggctgtgcgttcagtctggcgatgatgtttttcagcctgcggacccggcatgttcatgaagccgcggcgctttccggcatggctcagtcattcggatacctgcttgccgccttcggaccgctcgtattcggcctgctgcatgacatcacgcacggctggacggttccgttattcatgctgatcgcagtctccgttctgatctttattttcggagtcggagcgggaaaagcagaacagatcaaaacagcataaaaaaacaaaggacccgagacgggtcctttgttttttatctgaaaagcagtctccggccatcatgtcgtcagttttaaaccgatgacaccgatgaggataagccccagagacaccaattgtgacagattgaatttttctttaaaccagagtatgcccacggccgaaacgccgatgcttcccatgccggtccaagctgcatacgcaacacctgtgggaaggacctgcatcgcttcagaaaggcaaaagaatgaaagcataaagcctgttgtcatgacaatcagcggccacttttttttaaagccgtcaatatgtttcatggcaacggccgctacaacttcttccgctccggcaataaataacagcagccaagccattaatgttcactccttgttttattttctttcgtaaataccttcattcctaaaatgccggacagcagcaaagccaaaaagaatatctgcccgattgaaaaaggttctcctaaaataacgcccgttacatatgtgccgaccgtgcctattccgacaaaaacggtatatgcggcagccatggggatttttttataagagcggatcaacatcagaaagctgacggcaatcagaaggaaaataccaatccaatcaatgagcgaatccgcatgcttcagggcagacgcccaaatcacttctaacagtccggctatcagtacaagcagccaatacatttacagtcacctcaattatgaatgaatgtcagtcatttttatggcggtcaaaaatgatcggtctctgccaatcatttctgcaagcttcttttaagaaagctgaatatttcttttttatacacttcgagatcgacatcctgttcacagccgatataaaatcgttcagccgcgttctcgacaacgttgataatcgttctggccgtccatctgacatgaatgccgctgatgaccacattctgctcaatggccgtattgatcacgtcttccagccaggaataataaggctgataaatggcctcccatttttccattgagtgatcgatggcaagaccggaataacagaggacgataatatctttatgaagccgggtgatgtgaaatgtctcatcaaccaaaatgtccagcaccgtccaaaaatcttcagtgccgtcggttttccctttaattctgtccagcgtaaggtcgagcaggttttctgcaatcgctgatatcagtgcgtttttagaagaaaaatataagtaaaacgtaccttgggccgttccggcttttttaacgatttctgaaatggatgctttgtctaatcctttttcagaaatgacttcaatcgcggcttgcaggatcttttcatattttcccgagctttgttttgccaatagaggggttcctcctttatgaatgactgtcattcattttatcatatgattgtttttttgtcatccttaacaataaaaataccggaaagaagatcgtgcttctttccggcattcgtcatttatcactgtcgattatagccttcggcagccctgtatattttgcccagtaataaatgccgagcgaaccgatggcgatcagaatcaggtcaagcggattgctgataatgcccaatccatggccgaacgagccgatataggagaaaatcagcatcatgacataaaaaccgacgatccaccaggctgatttcagctgctgccgtatgctgacatcatctttaggggcatatttactgaaacagaggtagacgagaaacatgacaatttgagaaccgagaagccaggaaacagtgcgccagccggaccaatatacaatataagaagtaaaaataaacgacagcggtccgatgatgctcataccctttaaataaaacggtctgttaatatccttcgcgtttaccctcagcgccgctgaagaaatcggcgcaatcgcataagacagaatcaatgcgacggagcatacgttgacgagagcgttccaggaagggaacggcagcgtccaaaaaacagccagaccgaacgagagccaaagagaggcacgcggtgttccggtttctttattgactttagaaaagatgctgaataatgttccgtttctggcccaggcatagacgagacgtgaagtcgtattcataaagatatttccgttgccgcccggtgataaaatcgcatctaaaataaccaatgtcgccagccaccctaaaccgagtaaaacggcgatatctttgaacggaagggagaattcctgcccgatagccggccatccgtgcttcagtgtgtctcccggaatcgccccgataaaagtgatctgcagcacggtgtaaattatggtagaaacaataatacagacaattaatgcgatcggaatgttgcgcttcggattctgcacttcactggcgacagctacaatagggtgcagcccgaggtaggcaaacatgacaccgcctgtggaaatcgccgcctgaataccggtgaaaccaaaaggcgcaaatccgtgaacggtcatattgcccgggtgaaaatgaaaaatcagtaccacaataaccgtaatcggaacgacgtatttaaaaatcgaaataatgaagtttgctttcgcaaaggttttgacactccagtaattgaggaggaagaacaggcagagcagcgcaaattgcaatatccacccggcaattgtcggcgaatcggagccttttacggtcaaaccgggaaaccaatacgccacgtattggcggactgccgtgacttctatagaaataaggctcgtgtatgccacaatggtgacaaaggaaattaaatatccgacgagatgtccatgtgaataaacgggataccggataattcctccggtccgcggcagagcggcgcccagttccgcgtaaaccaagccgatcaataagataatccccccgccgatcagccaggaaaaagcccctgatggacccgctttagaggcgacgttactgacggcaaacagccatgccgaaccgaatatggctcccatgccgattaaaataagatcaaatagtgatatggatttctggaagtttccttgcttagacattcgctgcctccttaaaaagacattgttctatttacataattcccattatcattcgaacatacccagccggccggctggaaaattaggacaactttcgagttgatggtatgtacagcaatgtgctcaaattataatggagtgacttgaaaaacggccgtatctcaagatctccccgcatatattccctgttttgaccgcgttcaaacctcattcccataaaaattaaaaaaacgcccgaacgaagcaggcgttttttattacaagttcatatctttcagtcctgggctgtgctcattcggaagctccggaagctcaggcacaggaaaacctttaggcggttcggacacacttaattcgccgccgtttcggctcggcgtcgttccctgcagaatttctccgatccgtgtcgggtccagcctgaaattaaattgggtattatgataacccatctcaacgaatttccggcattccggatatttttcaatatcataattcggcacggggaataatttcccccattcaacacccagagtttccagcgcttttgtaaaagcattttgatgggcgttgtcacggacaatcaggaaaccgagtgtttctctgaacgtctgatttgaactcatttcataaatgcgcgttttttgcagaacgccggttgattccagcacaacattgtccaataagtcggcaatcagattaccgtgattgtagacccaagagccattccatgggttgccgctggcatctgcaggcagggaactttgcgccccgataatataatggtgcggattggcatgcttcaccgcttcatcaatcggcgcctgatctgctgcctgatttccggcaccctcagcgccgctttcgtcgagcagcgcattaatcgtattctggacgagctcaacgtgtgcaatttcttctaaaaatacaccgcgaagcaggtcgcggaactgcttttcttttcctctgaaattagagctttggaaaaagtattgcatcatcgtccgcatttccccgtaatgcccgcctaaaatttcctgaagcaccttggctgcggccgggtccggcttgtccggtttaatgatattgatcagctcttctttgtaataatacacaaacagcgccccctgaaataagttttcggttcttctgttagtgtctttgcaaagtcgatttttatgtatcggcagcaaacaaagggacggaaagcgtatcccgtccctttgttttaagcttcgaccgccccgcggagttttgtgttcacaagtccgttccatccttgatccattgtactgtgaatctcagagcttttccgattgactttattgatgacggcatccggttctttccatccgccgtgaatgagagtgaattccgtatctccgctttccgtttcttttaagacaaaagaaacgatccagccctccgtatcccacgaaaaagaaagacggtatggcgcctcgatatccaacagcttgcacggagatggaccgaatggggattccagctgaaactcactgtcttcctgaggcgtgaaatcattcggcataaaccagagggacagtccgtctgcagtggagaccgtatcccagacaacttgtatcggcgccttgaaaacggcggtatgaataatgtccggtaatgtttgattaccgctgttgctgtttttgttatcattgttttgtttatcagacatgctgtgtaaccactctttcgctgttttttcttttgatcatactacacagggcaggacatttgaaaacaaatcaaacttattttatgcttttccaaagcaattcaattcattttaagggagacgtagtgatgacagatcaatttaaagcgttagtagtcgatcaacgtgaagaccggttttcagtaagcgtacggcagctggctgttcaggaccttcccgagggcgaagtgctgattaaggtttgctattcaggcgtgaattataaagacagcttggccgccattccggacggcaagatcgtaacctcgtatcctttcgtaccgggaattgatttagcgggaatcgttgtttcctcagatgacgaccgattcaaagaaggggacaaagttattgcgacaagctacggcataggtgtttcccacttcggcggctatagcgggatggcccgcattccggcagattgggttgtgcctctgcctgatggtttgacacttaaagaagccatgacgatcggaaccgccggtttcacggctgcgttgtccgttcagcggcttgaagaaaaccatgccgcccctgaaaaagggaaggtcctggtgacgggagcaacaggcggtgtcggaagctttgcggtttccattctttcttccttaggttttgacgttgaggccagtacgggaaaagaagaagaaagcgcctatttgaaaagtctcggagcgaagacggttatttaccgtgacgaagtttataacggcacgttaaaaccgatgcaaaaacaaaaatgggcagcggccgtcgatccggtcggaggtgagccgcttgcgtcagttctcagtcagattcagtacggcggggcagtggcagtgagcggactgacagccggaacgaaactcccggctactgtattcccgtttatattgcgcggcgtcagtctcttgggaatcgattccgtattctgtccaatggaaataagaaagaaaacatggcagcgtttagctgatgatttcaagcctgcagatctggaggcctttattcaaaaggaaattacacttgaggagctgccggacacgcttcctgctctcttaaaaggagaagcgagaggaagaacgatcgttaaattgaatgaagaataaagcgaaaaccctcaacattagttgggggttttttcaatatataatcaattattggttaaaagtaaggttaaatattgagtaagttataaaagtaagctgattataaatatgaaatgattatatataggtcacatatagataaattataaaattttctgaaatatttattgactgaaagcgcttttaaaattatgataataacataagtgccaataatatcattataacttcactacaaagtaactataaaataacaatttgtcggaagggaagtgaatattaattataaatgataacgctttcatattgatttcttcattataggactgttttgggcggtcggagcatgtgtgcagacggtataggtgtaaatatcgataactgaatattcaggtattatctcagcataaaagctaggaggatttgaagatgaataaaaatagcagccagtattcatttttgaggaccatcattttagtatcgacgttcggaggacttcttttcggctacgatacaggtgtaattaatggagcgctgccgtttatggcggaacctgatcagcttaatcttacggctctgactgagggcatggtggcaagctccctgctcttgggcgctgcgatcggcgcggtttttggcgggcggctgtcggattataatggcagacgtaaaaatatccttatccttgccgttctgttctttgtggcgacgcttggatgtacgctggcgcctaatgtatcggttatgattatctctcgttttctgctggggcttgctgtcgggggagcgtccgtaacagttccggcatacttggctgaaatgtctccggcggaaagtcgcgggagaatggttacccaaaatgaactgatgattgtaacgggccagctgcttgcctttacgtgtaatgctattatcggcaatgtgctcggtgatacctctcatgcctggcgttacatgcttgttatcgcggcgcttccggcggtattcttgtttttcggtatgcttaaagttcctgagagtccgcgctggctggtttctaaaggaagaaaagaagatgctctgcgcgtactccggagaatacgcaatgaagaaaaagcaaagtctgagcttgctgagattgaatctgcttttcataaggaagcggagatggagcaggcgacatttaaggaccttgccgtcccgtgggtgcgccgcattgtgtttatcggaatcggaattgcggtagtgcagcagctcaccggcgtaaattcaattatgtactatggaactcaaattttaaaagatgccggcttcgaaacaaaggctgcattgatcggcaatatcgctaacggtgtgatttctgtgctcgcgacttttgtgggcatatggcttctcggcaaagtcggccgccgcccgatgctgatgacggggctgatcggaacgactgtcgtcctgctgctgatcgggattctgtctgtcatgctgaaaggatcgcctgcacttccttatgtgattctttcattaaccgtcactttccttgcgtttcagcagggagctgtctctccggtgacctggctgatgctgtcggagatattcccgcttcgattgcgggggctcggtatgggagtcactgtcttctgcctctggatcgtgaacttccttgtcggtttgactttcccggttctgctcgcaaacatcgggttgtctgcaaccttcttcatctttgtcctgttagggatagcgtccgtcatattcgtaaaaaggttcctgccggaaacaaaaggtctttcgctcgaacagcttgaacaaaatttccgcgcctatgaaaaaacagatcgaaaaaccgttgaagccgaggtgagcgggtaatcaggagagaagcagggtttttagggatcctgctttttcattcttttattatatagaaggaaataataagcgagaaaaaagttgtgtaaaagtgttgacgtgttttaaggggcgtggtatattattaaacgtcgctgatgaacaaagcggtaacgccaaatgagaaaatgtttttttgaaaaaagactttacaaattctcataagtgtgtataataaatgaggtcgagaaaaagacttcgaaacaaaatgaaaaaacgcttgacatcataactgattagtggtatgatagttaagtcgcctgataagcgcccgtagctcaattggatagagcgtttgactacggatcaaaaggttaggggttcgactcctctcgggcgcgccaatttaaatgcgggtgtagtttagtggtaaaacctcagccttccaagctgatgtcgtgagttcgattctcatcacccgctccattataatgatctttgaaaactaaacaagacaaaacgtacctgttaattcaaagttttaaataaatcgcacagcgtgctgtgcgatttatttaaaactttgaattaacaggtacgttttgtcttgtttagttttcaaagatcatctcaacctcatctcgaggcgacttttttagtataacatttcagcaagttgctgtcaaatgtttttttgtttttatttctccgccgctgtgagctttttgttgaagcgcatcagcgacgtttaataatataacacgcttataaatcagcgtcaacactttttttaaaagaatatcctcgatgatatacttcttgtcctttggtttctatttgggatacttcaataaagcctttttccgtcaggtaatcaagcatgacaccgagatcttgagtgaagtgcgccagttcaggatgctgaagcaattctccaaactgccacatttctttttctttcatcacttgaaaaagatgggcagaaccgatttcagcttttgaatgaatgagaaaatcatttgctaagaataataattcgagtcttttctccaggctttcgtgactctcgacaagttcggaatataacttatacacctgcggctcaatatgacggacctgattccagactgtcgtttccggataaaacccccggtcaatcacttctatgcgggccaagtggtgaagagcatgcactaccgcataatatgcgtccagaaaatgatcagcttcaaaaaacgcttttccttctacaaaccttctgatcagcttgccgtactccattccgatttttaatttgcgctcggcgaacgggaatgtgctgagccggtcagcaagctcagctatatattcattgcggtcaaacagcaccttgccgttgatgatccaatctataactcttctgtttgtccccagcaaaatccattcctgaagcagagcatccgttacaatatgtaaggaagcggttttgtgttcgaattcataatgctttataaaaagaggctcttcagcctgtttgacaatgacaagcatgaccgcatcaaagttatctgtgatggatgatgctttgctccttctctcaatcataaggacggccagcgtatcgggatgacttgctctttcttggtaaattggacggagaagattgtccattacgattcctccaatgcgattgtttcactagctattgtttctacatttctatgataaaacatgaaagtccttttttctaaacacattgcactattataacaaatttcctttcggctgccatatttattcttcccttttcttacgagaacatgaagaatataccatctgttttgtgctatagttaaaccagagggggatggacatggcgaaatactcaagcaaaattaataagatcagaacgtttgcgttaagtttggttttcgttgggtttatcattatgtacatcgggctgttctttaagcagtctgttttgcttgccagcttgtttatgattctcggcctgctgtcgatcgggctgagcaccgccgtttatttttggatcggcatgctgtccacaaaagcggtccgggtgacgtgccccgcctgtgagaaagaaacgaaaattctgggcagagtggatatgtgcatgcattgcagagagccgcttacattggataaagggttggaaggcaaagcgtttgatgagtcttataacaaaaaaaacagtgtgaaataaacaaagctgaccgtatcaaagcggtcagcttcgtttaatggttttcttttttggagcattcttggcagacaccgtaaatctccaaacgatggtggcttaccttaaaccccgttacgtgagccgcaagctgttcaacttcgtcaagcccgggataatgaaagtccacgatttttccgcagttttcacaaatggcgtgataatggtcagaggtgacaaagtcaaacctgctggacgcatctccgtacgtcagttcctttacaagcccagcttcccggaatacacgcaaattgttatatactgttgcgacactcatattagggaatttcccttccaaggctttatatatatcgtccgctgtcggatgagccatagagtccacgagatattccagaatggcatgacgttgaggagtaatccggactcccgtatccttcaacgtgtctaaggcttcttttaattcatgtgcagccatccgtcatgcacctctcttctaaaaaagattcttactttataatgtttataattagtgtacatctttttccggtctcctgtcaaatgtaatctgaagaaaaccccgtgatttcagcatttgtccattaatttgccgcaatttgttccaattcgcgaagagcctccgcaacatgatctttcacttttacttttctccactccttcacaagacggccttctttgtctaacagaaaggtggatcgctcgattcccatatattctttcccaaaattcttcttcagcttccacacgtcaaaagcttccgccagtttatgctcgtcatcgacgaggagctggaaaggaagatcgtgtttctgtttaaattttttatgtttgtcacggctgtcagggcttactccgataatgaccgcatcaagtcccgcaaaactttcgtgctgatcacggaaatcgcatgcttccgtcgtgcatccgggtgtcatgtctttcggataaaaatagagcacgacgtacttccctttaaaatccgttaatgatacttcttctccgctgtcgttcaataattccatatccggtgccgcttgtccgatttcaatcgtcatttcttatacctccgggttttttattaagcgtatccaattcacgttaagattacaaccgttatcccccgctcttttctggaagcaagaaccgttgtgctcgcaatgaagcatgctacaatagaacatgatgtaaggagatattaggagggtcattttttgtatacaaaatcagttgaacttcataaggaagcgttagaacatatcgtcggaggcgtgaacagtccgtccagatcctacaaagcggtaggcggcggttcaccagttgcgatggaaaaagcgaacggcgcttatttctgggatgtagacgggaatcagtatattgattatttagcggcttacggcccgattattaccggacatgcccacccgcatattacagaagcgattacaaaagcagctgaaaacggcgtactgtacgggactccgaccaaacatgaggtcactttcgccaaaatgctgaaggaggccatcccgtcacttgataaagttcggtttgtgaactcgggcacggaagccgtgatgacaacgatccgggttgcacgcgcttatacaggccggacaaaaatcattaaattcgccggctgctatcacggccattctgatctcgtgctcgtcgctgcgggttcaggaccgtccacactcggcacccccgattccgcaggtgtgccgaaaagcatcgccaatgaggtaatcaccgttcctttcaatgacattgaaagctacaaagccgcattggacaaatggggttcggaaattgcagcggtcctcgtcgagccgattgtcggcaatttcggcatcgttgaacctgaagaaggctttttagaacaggtcaacgaattgacccataaagcgggcgcgctcgtcatttatgatgaagtgatcacggcgtttcgttttatgtacggaggcgcgcaggatcttctccaagtgaagcctgatttaacggcgctcggaaaaattatcggaggcggcttgccgatcggcgcttacggaggcaaaaaagaaatcatggagcaggttgctccgctcggcccggcatatcaagccggcacgatggccggaaacccggcatccatcttatcaggcatcgcctgtttggaagtgctgaaggaagaaggcgtttatgagcggcttgatcagctcggcgccagacttgagcaaggcattctcacccatgcggagacacatggcattaccatcaccgtcaatcgattaaaaggcgcgcttacggtttatttcactgatgaaaagatcgtcaattatgagcaggcggaaaatacggacggagaagcatttgccaagttctttaagctgatgcttgagcgcggcatcaatctcgccccgtcgaagtatgaagcttggtttataacaaccgcacatactgaagaggatatcgacgccactttaaaagcggttgaagatgcgttcagacatatgaaaaattaactgccgaaacaagcgggagcccggggcttccgctttttctttttgtccgatttgtgagataatggttttttcaaaaaaagaccttgaataattagcacgatccctgtatattactttattgtttagcaaatcaaccgacagggaaatgtaagtgtcagccgttcgttcggcacataatttattagagaaaggaatgcacgcacaaaccaatgaaacttggtgcccgcatttttaaaacagggattgcgattacgctcgcgctctacttagcatcatggatcggacttccgtcgccgatctttgccgggattgcagctatatttgccatacagccctctatttacaggtcttttcttatcattattgatcaggtgcaggcaaatatcatcggcgctgtcatcgctacggtattcggactgattttcggaccgagtccgattatgatcggactgaccgcagtgattgtcatcacgattatgttaaaactgaaaattgaacacaccatttcgattgcgctcgtgacggttatcgcaattttggaaacaccgggaaacagcttcctgacgttcgctctgatacgaacaagcaccgttattttaggggtgctgtcttctttcattgtgaaccttgtgtttcttccgccgaaatacgaaacgaagctgactcatcatacggttgaatataccgatgagatcatgaaatggatcaggctgacgatgcgccagtctacggagcactcgatattgaaagaggatattgagaagctgaaggaaaagatgatgaagcttgatcatacgtaccttctttataaagaggaaagaagctactttaagaaaacgacgtatgtaaagtcacgcaagcttgtattattcagacaggcgattattacggcgaatcgggcgcttgatatgctgaaaaagctgcaccgctatgaaaatgagatttatcatatgccggaggaatttcaggagacgctgacagaagaaatcgattatctgcttcattggcacgaaagagttctgatgcggacagtcggcaagattaaaccgcatgatgacgatgctgaagaaagcattagatataaacagcttttgacgaagtctttcttaaaaaaccagcagaactgcgaagatgaactgcttgattacaatatgctcagcattatggctgcggttgcggaataccgcgaacagctggagcatctcgatacgttaatcacgagttttcagacataccacccgaaagacagcgaattagaaacagacgatgagtaacccggtgcttcagcagaaccgggttttttgtataaaaaaacttatgccgccaaatcggacggcataagtttttcggtcagtttaaattctggatcgtaaataagtgtctgtactggccttcccgcgccattaattcctcatgcgtgccggtttcaatgacggcgccgttttccataacgacaattttatccgcgtgcgtaatcgtggacagcctgtgagcgacgataaatgtcgtccggtttttcgcaagcttgtccatcgcttcctgaatgtagtgttcactttcaagatcaagagcggatgtcgcttcatccaaaattaacagcggcggattttttaagaaaacacgggcgatggagatccgctgtttctgtccgcctgacaatttgacgccccgttcgccgactttggtctcatagccttctgggaagcccataataaattcatgggcatttgccgctttcgcagccgcaaccacctcatccaaagacgctcccggtttaccgatggcgatattttcacgaatcgtctcactgaacagaaatgtatcctgaagcaccattccgacttgattgcggaggcttctcgcttcataatcgcgaatatcggtgccgtcaatgagcaggctgccgccggacacatcataaaaacgcggtataaggctgacaagtgtcgatttaccgccgccgctcatcccgacgagtgccacggtttccccttttgtcacctttaaagaaacgtcccgcaatatcgattctttcccttcttcgtaacggaaggagacatttcgaaattcaacctcgcctttaatgccgtcagcttttaccgcattcggtttatcagtcagttcatacggttcgtcgataaattcaaatatgcggtccattgaagcgatcgactgggtcagcgtcgtcgatgagttgatcagtcttctgaccggattgtacattctgtcaatgtagccgacgaacgcaaccatcgtccctacggtcagcgggccgtttatgacaaaatagcccgcaaacgcgataacgagcagcggcgccaaatccgtaatggtatttacgaccgcaaacgttttggcgttccaattcgtatgacggatcgctttgtcaagaaaatgtccgttcttttcatcaaaattggcttgctcatattcttcaatcgcgaagcttctgataacgggcattccctgaactctttcgtgcaaatgcccctgcacctgagcgagtgcctgagagcgctcgcgtgtcagtttccggagacggccgtaaaagtatttcactgaaatgccgtataacgggaacaaaatgacagaaatcaatgtcagtttgacatccaatgtgaacataatgcagatgacgatcagcactgtcatcatatcaagccagatattcatcagtcccgttatgacaaagtcttttgtctgttcgacatcatttatcacccgggaaatgacttcgcccgttctcgtgttggcataaaaccgcaggctcagtttttgaatatggtcaaacaatactcccctgatatcgtagagcacccggcttcccgtccattgcgcgaaatattgccgataatactctaccgggggacgcagaactaaaaacagcacgaacatgatgcccataatcgtgaatagtgtcgatgttttagcgcttgccgttccgctcccttgaataatgtcatcgaccacgtattttaacagaagcgggagagccagcgggatggagaattttatgataccgattaacactgtgataaagatttgttttttatagggttttacaaattgcatatagcgtctgattacgcccacactttatccccctctctctttaaggcgtgtgagcccatgtgaaaaacctgttgacaccccaacaggtttttattgtattctttattttgtatagcgcagataccgttcataccacatatcaacaaattcaggagcaaaagggcctttccgctgatgaatccagtgcagcagcgtattcagatactccttcagaatgctgtcgatctctttaggataattcattgatttgcggtgatcatcgtattcatcctcgtccagaatgttatatgtcatatccggaaacactttgacatccaaatcgtaatcaatatatttgatggcctctccgtcataagcgaacggcgagctgatgttgcaataatagtgaactccgtcatctctcagcattccgatgacgttaaaccactgacgggcatgaaagtagcatatcgccggttctctggtcacccacgtccgtccgtcggattccgtcaccattgtccggtcgttagctccgatgatacacaattccgtactttttaaaatcgtcgtttcgttccaaattcgatgaagcagcccgttatgcttatagctgtgaatttgaatcgtttctccttccttgggatatcccatatttctcccctactttctgtaaagccctgcagtcaatgcagccgcaattgctttccgacaagtcttttcactattataacgttacgaattaaaaaatgaaaataaaagaaccactccgcttccggaatggcacattcatttctgcacataggaagacggcttttccgtgctgcgataagactggatgacttgctctgtctgcctttggaataactcctgtatgccggccagatcttttcgctttgtcgcaatttcgtcctgtacattgtccagctttgcatctctttccagactgatgagttccgcttccacctgccggcagcggtcaagttctgactgcagctcgagaagctgatccatgatcttcatctgttcacttacaagcttttcaaactctgacatcgggttcctccttaggcttttaggttgatactacttaccatttcgagtttctgccggaaaaccctttgactcattctgtagaggaatcacaagttttgtcgttttgataaaagaaaaaagcacttccacccgaagatgaagtgcttttttgtttcagtgattagctgttttgttgtttgttttgctcagcagattggttttgctttctcacctgctgcgcatcagtttcactgccgaattcagtaccgtattgaccttggccggaagctgattgctggttttgttttttcacctgctgaacgtcagttttgctgtattttgagttttccattgttatcacctccacgcaatttagaatgcgcaggagacgatcaggctattcatctttttaaaaaaacttacacgagcagagagcgtccgccgtcaataatgatggtctgaccgcggatcatgtccgcttttgaagaaactaaaaactccaccgtgtcgatcatgtctttaatttcgaccattcttccggccggcgtattttgacgggcatcttcaagcaattcttctctgttagggaaatgcttcagcgcgtctgtatcaatcgctccgcctgaaacggcattcacgatgatatttctcggcgaaagctcaaccgccagataacgggttaatgattctaaagcggcttttgagacaccgaccgtcgtatagttctcaagatagcggatgctgccaagtgagctgatgctgacgatgtggccgcctccggttttttccatcagctttgccgcttcctgggcgcagaaaagcaatgcttttgcgttaatattcattgtccagtcccaatgcgtttcttcaagttccatgaccggtctcagcacgcctgaagccgcgttattgacgaacacgtcgagtctgccgaaggcttcgtcgatctgacggaacatgtctttgatttttgccggctggccgacattggctttaacgacgagcgttttgacgccaagtttttcaatttcttcagctgtttctaacgccgcttttttactgcgggcgtaattgattacgatattgtagcctttttccgcgagtctgatggctgctgctttcccgacgccgcggctgcttcccgtgattaatgcgcatttattttgttccatttttcctcagctccttgctgcgtatagttcttttcattcaacaaacaataaaagcattacctgttgaaaggggtcttttcatatgtatgtcggacgtgatatgggcgaattggccatgatgccaaaaaaagattggaaggattcagagctcgcctatttccatcatgccttccagcaaattatgccgtatttaaacgaagaaggccagtccaaataccgggagctgattcaggaaattgaagcccggggcggactgaaacggaatgaggcggattacggccacggcacacgcgtcagctatgactgacgcttcttaccggcggccgccttcgtccgccattttccaaatcttttgatgggaaacgggaaaagcgtattcttcgagttccccttttgtgacccgtattaattctgatgtgtccgacacttgttttactttaccgaaaaagaccgaaatattccagacgagatgagtgaaaacatgttctacgatgccttccagctctccgatttcagcggttgctcccatttctttttctaaaaaggcttcgagctgctctcgttcggttttggttcctttttgggtttcggtattcggaaactcccacagattggcgagcaatccttttggcggccgtttatgaatatagacattgtcttggtcgtctgtcagcacaacggcggccattgtttttactccgggttttttctttttgcttttaacgggcagctccctctctgtcccttctgcaaatgccgagcagtgcttttgcacgggacacagcaggcaggacggagatttcggggtgcagatgatcgcgccgagctccattaaaccctgattgaattcagatggtttttcatgagaaatgaaagctgataccgcctgttcgaaaatcgttctggttttaggttttgcgatatcgtcccatatggaaagaattctcgacatgacacgcatcacattgccgtctacggcgggaatcggtttgttgtatgcgatgctgagcacggcgccttttgtataagggccgacgcctttcagtccgccgaattccttttcctcagcaggaacgattccgccataccgctcgtgcacttcctgtacggcgctttgcagatttctcacacgggagtaatagcctaacccttcccaggctttgagcactttttcctcatcggcctcagcaagcgccgagacggtcggaaactgctcaacaaaccgccggaaataaggaatgacggtttctacccgcgtctgctgcagcatgacctctgacacccacacccgatacgggtcctgattttctctccatggcagaattctttgttctctttcgaaccatgtaattaagtcctcgcgaaatttgtctatatctttttgtttcattttttcttcaagtgcgttcatatcttctcctcagatgtttcgggtcccgcttttcttgacactgtattttggtgtaaactaagggcacgttacgataatatgttacattaaatagagataaagaaaaagcggaaacatatgaaaacggctgatacacgccatgattgggcaaacagaaaatggggaatatcttataatggaaatatgcgggcggactgatttttaacgcctgctaggaggtcaccaatggatactggcactcacgttgtcatgggcatcgcgcttggcggaatcgcaactcttgatcctgccgtcggcatgcatacccccatgtctcaggcagttatgatcgccgctcttgccggctctcaggcacctgatattgataccatattgaagctgaaaaataatgctgtttatattcgaaatcatagagggttcacacactccattcccgccgttttattttggtccattctgattccgggcattttgtttatattttacccggaagcgaacttgctgcacctgtggctgtggacgcttctggctgtcgttttgcatgtatttgtggacatttttaacgcgtacggaacgcaggccatccgcccgttttcgcgaaaatgggtcgctctcggtataatcaatacctttgacccgtttattttcatcagtcatttggccgcgattgccgtgtggtatatcggaggtcatccgggcgtgacatttttgacgctgtatatcatccttgcgggttattacgccgtccggattatcatgcagctgcggataaagctgcggctgcgcgagatgattgaagaggagattgaaaccatcatcatttcgccgacgatgaaattcaggcagtggcgtatcgccgtaacgacggcccatgccttttatgtcggcagaagccttgacggtcatgttgtgatattggatacattcaaccgtgtgcccgttccggaaaccgatgtgatgaaggcggcgaaacaagatgaaaatattgcagcttttctttcgttttcccccgtttacaggtgggaggtcgatacctttaaagatcattatgaggtgcgctttattgatttgcgctaccggagcaaaggccactatccttttgtcgccatcgtccacctcagtcatgatttagaggttctttcttcttacacgggctggattttcagcgaggaaaaactgcagaaaaaattaaagctcggctctgtttaagagccgggctttttttgtcttctcacatatatgacggcaaacacgagactgatcaccgatatagcggccgccggtttaaaatacggcggataatacgttaattgaatatcattttttcctttttgcgctttaaatccgataaaggaataatccgctttttcaatctgttcttgtctgccgtttattttcagctcccagcctttttcatatggaatcggaagcatgatatacggcgcgcgggttttgttttcatacgaaatatgaagcgtatttccgcgccagctgaggtcggctggcggttctttttccgcttttcggtatgcgcttttcagcgtcgcgtaccgttcttcgtaaagcgccagtctgtcgagctgatacgatcctttcggcagccggatttggatgttttttgttttcggcactctgacggtgagatcgttgacacctgttttgtaaatggattgattcgattttctcgttgtcgtgtaatcgttcacttttaatgtaaagccctggtccttcgctttgttcattaaataaaagctgacgtaataatctccgccgtcagccgcggcgccgtgcggcgtaatgatcaggccgcctccgtcttcgtttaccgtcaggatgccgtcacgataatccgcatgttcgggggctatctctgcctgacggatgatattttccgcttctggcggttttttcgtttttgttgtgttcgattccgtgacgatcccgtcaagcattgcccgttccctggctagggcgggcgcttttttcaggtcgtcctcgttatatactcgatcggctgtccgtacgaacggaagtacatattgattttgataaaccgcatagcgggatgattccatgatctttttgaacccgtacggcacgccggcctcgtttgttttttccgtcatataatattttccgtaaagcaggctgtataaattagccctgtttcctaatgtcgcatagcggcttacgctttctctgcccatgtcaatctggaggtcattccagtagaaggacagcagattgcggttcaggatgcttgagtaaacgctgaatccgttgaacccgtatatgatcggggtattattgaatacgccgttcatccaatctaaacgggcaaaggggtccgggtctttttctttcagacgctgaatgagctctgcttgttctttgcctttatagtcaggacccgtcatgaatgtatgcgataccgtataaatcttcccgccttctgataaagcatatttttcatatgtattggccgtcagcaccgcagtcaagagaatgacgccataaacggcgggcaccgcgcctctcagtcttacctttgctgcaaaaaaagcggcaatggtcagccccagaaggagcaggatggacaggtaggcgtgatcagaaatatccaggctgaaccgtctcatctggctccaatagagcagaacggcgagtacggcggatatcagcatactcttcctgctgatgtccgaaagcttagaaagccctaccgcaaccgttcctgcaaccgtgaagcacaggacgtattcaaacctgttttgcggagctgaaaaaccgttaaaggcgcttgccgcaaacggactgaagtgaaacagaatatacagcagactgattcccgcaaacagccggaacaaccggtttttgtataaagaaaatgtaaatagaaaaagcaaaaaagccgccggcaggatgataatccggcttgaaaataaaatgttgtcggagaaatcaagccaatcaatatgctgtgaatacggcggccgcagattattgagatatccgtacacgacagggataaaggagactgcgcttataccgaaaccgagcaggcctgacagaataaacatccggcattgagtgagccttttcgcctcattgtcttcaaggcggatgatccaccggaataagatgtaaatgccaatgaaaatcagattaatatacgcaaaataaaagttgttgatcaatgtcagcgcacaggcgaaaataaaccacgccggctttttttccctgatgatcttttccgcgccgaacacgagcagcggcagccacaccatgctgtcagtgaaaaagtcccaatacacctcatgccggaagtagataatcgagaccccgtacaacacggcgccgacaaaagcaggcaatgtccgtttgacgaaataacggaacacacaggccgccgtgaatatgatgaaactctgcttggcgatgctgataaaaacggaggcctgcgcccaaaacagcgcatccgcctcacccgacagctgcataagctgcagaatgcggacagcggcggaaataaacagaaaaagaaaagaagtagagaaataatagccgagctgactgtacactcccccgcccagtccgaacgaatagctgtaaaacagcctgccgttcatatattggtcaaacagcagctttttgaagaccgccatttgggcgatcccgtctccagaccccgtcatatagcggcctgccgaccactcttttaagaaaaaaacatgagcggctgccgcagccagcacacaggctgccggcaagatccatttattttttttcatacaacgtctccataccctgcgcacagcggcggctgtttaatggttccacttgcgcttttttgtataattcgtttcattttgttctccgtacgtaatattcgcttctttaattaaatagtgcgggcgtttttttgtttcatagtaaatccggccgatgtactccccgatgatgccgagactcaaaagctggatgcctcctaaaaacagcacggcggaaataatggtgaagtatccgggtacggacacaccgtgtgtcagaatatgaataaaggtcgtgacaatataaaccatcgacagaagcaatatcagaataccggtgaaaaagcaaaccctcagcggtttgttgttaaaggagacgacgccgtccattccgtagttgaacagattgctgaatgaccatttggacgtgccgttctgcctttcgacattttcataaaatacgattttctggtcaaatccgatccagcagaacagcccttttgagaagcggttcccttcactcagcttcaaaagggcatctacggcctgtcggctcagcaggcggaaatctccgaccccgtcacgcagatccacttcgacggctttgttgataaatttataatacagggaagaaagcacggaacgcacggggctgtccccttttcggttgcgctgcgcaatgacttggtcatacccttcttcatagccttgaatgaagtctttcagcagatgcgtcggatgctgcaggtcggcgtccatcacgattaccgcttcgccctgcacgtgttcaaatcctgccaagatggccgcttcttttccgaagttgcgggaaaaagatatgtatttgacgcgatggtttctggcggccacttctttaatctgctgaagcgtgtcatccgcgcttccgtcattgatgtagaaaatctcatagtcataatgaatcgtctgaaactctttttttaaagattcatggatgagcttgacgttattcccttcattgtaagacggaataataattgagattaacctttgtttcatgaaggcaccttctttgtattattcttttttagtacggccttaaaggcatagtccgcaaaacttcagtaaggcttttcctttttttaatgtcgtttaaacccttttttcgttacaggggtaagaaaaatttttctgcatatggttttattttgtcatgtttttcggcagatatgagaaaaaaaagaaaaagtctgtacccgggacagactttattgatgaaggtattcatgaatcaaatggctgacgatgcgcggtttttcgtgaatgacccaatgggaggcatcatcgatgaatattaattcgccgttgggaatcatccgttttgtttccacggcgagctttttgcttagcgcacggtcattgacgccccatatcaatcggtacggaacgggcattttaaacggtacggcaggtcctaaaccgccggctctgatcgcccggtaccagttcagcatagccgtgagcgctccttttctgtcccatgcttctttgtagctgtcgacatcttcccgtgagaaaagctccgggcgttcggataagccgatcgcatgatccaatacgcggtaattgtcttcagataatctccgttcaggtttttccggaagctgaaagaacgcgatataagagcttttcttccactgcggcgggtagaacggggtgaccttccgcataaccgccgggtgcggaatattgaccgtgatcaatttttcaacgtattgcggccgcgtggatgccaagtgccaggctacggctcctccccaatcatgaccgatgacgacggccttgtcatttgtaaaatgagtgatcagcccgataatgtcgtctctgagcgtatcaatggtatagttttcaatgccttcaggtttatcactgagattatatccgcgctgatcaggcacgacaacatggtatccggcatcggcaagcggtttgatctggctcttccagccgtaccaaaactccggaaacccgtgcagcagcaccgccaaaggaccatctttcggaccggctgaagccgtgtgcagcgtcaccccgtttgtttcgatcatatgaaaagtaatgtcattcaatcggttctcctccccttttgttttaatcttctttctgttaaggctatgatcagggcgctgatcgcgatcaataatacggcctgaacggtcaggctgtacggctgagtgagctgaatgagcaggctgcccgcaaatccggctgcagccatcagaaggccgaacagaatcatgaggagcgcactgaaacggttgccttctttccactggaattcatccgccatagaccgtttcgtccgatatccgtacaggctgttaattgacttcggcgggaaaagtgtgactaaaatgccggccgcagccatcagaaggcctccgattaccattatcatatctgtcactctccttttcatttcatacgaaaggaaaggcggaaagtttcagaaaaaaagcaggctcatccgcctgcctgaatctctatttttgagctaagtcggccgtcttcacatagcctgctttcccgccgtatgtgacgtatgcccatttacggtcaaatcctccgtcatggctgaatccccagccgagcacattgacggtttcacccgctttaacggagctttttttgccggtttccaaagtcggcgtataaaaatcggtttgtttcgcggtcactgccttcatcggctgcttcatcagaaaatgagtggagatataggctttctgacctttgtagttaatctcggcccaatctgccccttcaagctgtttaacctttacggcatcttctgaacggagcgtgccgacaatcaccccttgtttatttggttctttacggacgttaagttctcctgctttcacgatatatgtatctgctgcggtgtccagttttgtctgatgagctggtgcggcattcgctgccggatcaaaaaaaacggtgcctgcggctaaaaataagcaaagtcctgcggccggaataaatgcggttaacccttttttcatgttcattgtggttcctccccgctattttataagttattacacatttccacactccgcgggttatcaaacatgtttttcctatttcttttataaaaagaaaaaaccgccgggagatatccggcggaacgcactggtatgttaatgcaggagtcccctgctttgatccaaataatgagaaacgtcttcccgcatgctttggaacatatggagcttgctgccgtatgattcaatccattccttaacgacgcgttctgtcatttgctctccttgatacgggcggccggcttttgcgtaagtcgcttcgaaatctccccataagagctcaacccaagttcgcgcttgcaaatagctgatcatgtcatttttctcaagcagcaaattcgtcagtttgtcgatatatgtattcatgtctctgtctcctttccttgggaaaacctgctgcttttacacagcttgtcacaggcatatactaactttacgtcttcagtccagaaggcgcaaccttttgatattggccgagggggaaaacaaatggtccggaacaaggcaaaaggatttccaaatcagaacaacaataagtttgaaggcgaaccgcgggcaaaggatgactacgcttctaaacgggcggacggttcaattaattcgcacccgcaagagcgcatgagagcttcaggcagacgataacacataacgtaaagagaccgggaatggcccggtctcttttttgcggcgaaaaaaaggtcataacgccaaacaaattccataatatgttaaatgttaaaccgaaagccggtagacaaaaaaggagggggttttatacaatgaagacagtttcaaaacgattgctgagctttaccgcattctttctgtcagtttcattatttgctgtttcagcagaagcccaaggcagtccgcagacatccgtatcgaacagcggtgaggagtttgacgcaagtccgaatcagcctgtaaaaacaacacaaacatctccagcttatgaaggaacgggcctcaccaaaaaacatcctgcacaaaacggcaaagccgacatcaagtcattaaagccttccagtattatagggacagacgaacgaatcagaatttctccgacaacatcatttccttatcgcgcgacagcacagctgaccgttacatacagcggcagcacaagcacttacggatgcaccggattttttgtcaatgcagacacgatcgtcacggccggacattgtgtgtatgatcagaaaaacggctgggcatcgaaaatcacggcagctcccggccgcaacggctcatcgtacccgtacggatcatattcaggcaagacattctacagtgtcaaaggatggacagaaaacggtgataccaactatgattacggggcaattaaagtagacggatcgcccgggaatactgtcggctggtacggctaccggacgaccaacagttccagtccggccaggctgtcttcaactgtgacgggatatccatgcgacaaagtgtccggttccatgtggtctgacagcaagccgatacgttcggccgagacatataaactcacttacacgacagacacgttcggctgccagagcggatcgcccgtttatcacaattacagcgataccggccagaccgccattgccgttcatacaaacggcgggtcgacttacaatctgggaacaagggtgacaaatagtgttttcgacaacattcaatattggtcaaatcaataaagtttttattttctttctcgccgcggctgttttatgcggatgcagcaaagcggatgattccgccgccggcaaaaaaacactgcccgttactctccattttgaggatgctgacggctcacctgctgacggtgtgacggtcacagtgatgaaagcggcggagtcagatgatcagccgaatatagaccgcggagagataataggcaagaccgatcaccacggcaatatcgcctggaaaagcgggacggaaggaacctatgccgtcgtttttgaaaaagacggcataccggaaacccggaatatttccttagttgagagcgataaacatacggtgatcagctttacattgaaacattaaaaaagcttgcaggcggattatccgctgcaagctttttgttatcctttatgcacttggtattcatagacatctttcttctcagacagatgagcgaatgtggaaagcacaaggccgagagcggtcatcagcgcaccgcctgcaaacagccatgagtaagatcccgttccgccgagaatcaatccgccgagccaagcgccgagcgcgtttgcaaggttaaatgcggaaacgctcaccgcggcggcaattgtcgtgccgttttcagatgaagaaataacctttgtctgtaaaagcggcggcgtgccgaacgcgcatgcgccgaataaaaatgtcgcggaaacggccgcggcaggaaaaacagcgatataagggaagatcgccaagacgccgatcaagccgatcatcacaccgatcattgtgcgcgtcagcagtttgagcggcactttccctgcgaagaaattccccgccactccgccgagaccgtaggcaaataatgcgcctgtaatgccgaccgtgccgaatcccgctgaatctcttaaaatcggctcaataaacgtgtaagcaataaatacgccggagtagccgagaatggtgatcgcaaaggagaagatcacttgcttatgcttaaagacactccattcattcatcagcatcggaatcactttcggttttcgattcggtacgaccagcatcaggccgatcagcccgatcatgcctaaaacggaaataatgaaaaagacggcccgccagttaagaacatcccctaaataagagccgaacggaacgccgagcatcagcgccacggttaatcccccgttcatggacgcagctgcggcggaacgtttttcaggcggcaccatttcactcgcaaacaccatggcgatcgcaaaaaaggctccgtggatggatgcggataaaattcttgaaatcgccagcacggcgaagtttggcgcaaagacgctcatcaggttggcaaggacaaagatgcccatcaagctgagcagcaccggctttctcggaagtttaaccgcgataatcgttacaatcgggcccgtcaggcagacgcttgccgcatacgcggtaacaagcatacccgctgaagaaacatgtatatgaaagtcatcggcaatcgacgtcagaatacccatgacagcatattccgtataaccgatggaaaaagtgcaaatcattaaaacaaaaatcattaatttcacagatggctgtttcattttgatattcaacgctaatcgcctccttttactaaaaaacaacgaattccatcttaaaagatatcgaaaatgaattcaaacattttttactgaaagtgtgaaacgaatgtgcccgaaaataaaaagagaccggatccggtctctttcgttaacttttttcttttaaaacggaaatcggcagtgcttcttcctgatcaggcgacgaagatctgtgtccccaggcgaatacgccgttcatgtaatcaatgcggaacgtatcatcagtaccttctatctgatactccgcgcccggcagaaagtcttccgggttctgcatgtaggctttggccatcgtgattttccgttcaagcacggccagttcatttacaatgcccatctgttctgcttttcgcgctttttccgtcaggcccgcaatttccgtctgtagttcatgaggcgtcatttgactgtatcgtttgtccatttcagcttactcctcttcctgcaaaaattgttcaatgtcgtcaatcgagaatccttttctgaataagtactgcttgaccttcattccgctttcatagctgccgtcatagcggtatttcctgattgctttttccgcatgagtcttcaaagcttccatctcagcttcgtcatcattctcatactccgtctgctccagagcggcattgatgacgtcgaaagggaagccttttcgctgaagctgcatctgggcccgctgtctgatctcttttgtggacagctttttgtcttttttcaggatttttccgatatgtttcagcgcttcctgtatctgctcatcaaacgtaaacgcactgagcgtctccttaatggtatcgtcgtctattcctttcgctttcagctcgcgaaacaggacgtcaggccctttgccgtttgtttttttgtgggtgctcgcataggcttcggcaaattctttgtcatttaagtagcggtaatcgtacagtttgtggatgacttcagaaataaccatctcaggtgtttctttttttttcaaatggtcccggacttctttttcagagcgcatccggtatgataaaaattcgacggcgcggttaaaggcttttttcacttcatcgccgtgactgatttcaagaatgtcaagctcgtccagttctttcccttttttcaggtcaaaacgaacaagcacgtcggcgtcgacgctgaatgcatatttctcatcaaggaagatgttgaagcgttcggtatttttcttttgggtcgatatttttgtaataaacggcatcccgatctcctttcccgccccgattttcaggcgtttttcttttaggcaaatgaggtaaagtatatttatcaacgtgtaaggagagatggatatgaatatcgcgatgacaggcggcacgggttttctgggccggcatctgacaggtgtgtttacccgccagggacatcatgtctatattttatcaagaaaacaaagagaaaccgaacaaaaaaatgtgacatatgttcaatggctggccgaaaacgcggcgcctgagcgcgagcttccccctattgatgtatgggtgaacctcgcgggcaaatccatctttgaccgctggacggacacaacgaaggaacaaatcatctcaagccgggtagaagcgacgagagaagtcagacggattatccggcagcaggcaaaaaaaccccgggctttaattcaggcaagcgccgtcggcatttacggcacaagcacagagaaaacgttcactgagcagtcagatacgtcaaatgaagacttcctcagtcatacggctcatatgtgggagcgtgaaggccagaaaattgaagcgctcggcattcggacggtatatgccagattcggcgtgatgctcggtgaaaaaggcgccctgccgctcatggttctcccttataagctgttggcgggcggcaccgtcggctcaggacggcaatggctgtcatgggttcatgtcgatgatgcggcggaactcatcgcttatgcggcggagcatgatgacttgtccggcccgatgaatgtgacctcgccgaaccctgttgaaatgaagcaattcggtaagacgatcgcaaccgtcctgcaccgcccccactggattcccgtaccggaattttttctggagaaggcattgggagaaatgagcctgctgatcgtaaaagggcagcgcgccctgcctaagcaggcgctgacatccggttttcaatttacgtatgaagagcttgatttcgctttaaaggatctcttacctgcataaaaacggaaataaaagccaatcctattggtattctgttttgaaggaggatcttcttttatggaaaagaagcgcgaaaaacatcagcagggagccaacctgaaaaaaatgcaggaagtcctttattccggtgaattcaaaaaagcggaaaaagcagccaaacggaaataagctgaataaagatcgggactgggcagatactatgtttgtttgatatcacttttttcagggggcgattgatatgggcagaaatcatactcacaaaaaccgtgataaaaacaaacaaaagcttcctcaagttccggacgctttgaaacgcgaaacggacggcacatatgaggaatattcaagcgagcttgctgattccgctgaccgcgaagcgcaggcgcggatgaaagccgctgacaacagagctaaaagcaaaaaccgctaatacaaaatccccgcctcttgaaggacggggatttttttacagttcggtaaacaggctttttgccggcgtccgttctttcgccttaggctgttcatccggatagcccgtttgaatgatcgccgcaaagcgctcattgtctgcaaggccgaagtcttgatgcatctgtttgtcatacatgatacggccgcttttccaaaccatgccgatgccgttttcatgtgcgagaagctgaaggttttgaatcatgccgctcagcgcagcgaaatcatcgtttctcgtaaattcattttcatcttcttttaagacgaccaataaaaatcccggaacggcgctgaggttttttctcatgttctgctctttttcctcgttgaaatcatcttttatcttcttgaaaaatgagacgtagctgtccgcaagctttgcttttcccgcttcgcttgccgcgtaaataaaacgccacggctccgtcagcctgtggttcggtgcgtaaacggccgtttcaagcatatctaatatgacttcagaaggtacggtttccggtttaaacgaccggatggatcttctgtttctgatcgtatgtttaagtctctcgttttgctgtgattgttcggttttcggcatgccgattcaccttcctattcaattgaaaatgattatcatttataatataacggatagaaccgtcttttgtaaaccgttacggaagctgaagattgattgattcggcatacacagccgttcccgtcatctggatattcatctctccgtcttcctccgtgatcctgatttccacttttccgtctttccctatttcctgaccttgttcaatcgtcagccattcggcaccggagcctccgtattgccgcatataggctgccatgacgcctgaagcggttcccgtgacgggatcttcggtcgttccggaaaagggggaagaaaaatggcgtccgtgcagatcgctttcagaatgcacggtttccagagaaaaaggatgaacgctcgctttcgggagatcgtgtaaaatggcgggaaattgtgtgttgtccggcaccatatttcgtgatgcttccagtgatctcagcggaacaatcagtgtccaaattcccgttgatccgtaaacaatcggaagctcatcgtgaaaatcctccgccgtaatgccgagagaggccgcaagcttttctttgtctcccgtaaacggcagaaattgcggggaagcctgtttgagcgtgatgtacacccgcccttttcgttcagcggcttttacaggaagaatgccggctttcgtttcaatttgatacgtctgatcagcctgaagctttcccttttcaattaatgcatacagagaggcaacggtagcatgtccgcataaattcatttcatggccgggtgtaaaatagcggattttcaaatcggcttctccgcttttgcagagaaatgatgtttcattgtatcctgccatttcggcgatcatctgcatttcttcatctgaataatcatctccgttaagaacgattcccgcgggatttcccaaatcaggaacatcggtaaacgcttcgtatttcaatacgtccgcctgtttcattcatcaatcttcctttcgccttatgatcatgttattcagtataacaaaagaagcgggaattttcggttaattacccagaaaaaaagacgcctttttaacggcgtctttttttggtttttccgatcaggcgggtgacgagaatcatcgtgacggacagcgatctgtttttgcggtacgccaagtatttcccgcgccactccggtttgtatttttctttaaaggcccgcagaccgctgaagctgtacatataccggacgttgttaaagatgacggccgcgattctttccgaccagaaggatgaaaaggccgttcctacgtttgacaaaggcgccatgcccatattaaaggtggtgtacccttgttcctgcgcccagagaaacagacggatgaaaagcgcgtccatgataccgttcggcgcgtttttccgataacgcattaagtcgactgatatctcgccttcctgatacatcggcataaggttggcaaaagcgatgatctccccttctgtgtctttcacgtaagcaatcggggcctgttccaaataatcccggtcgaagaaaccgagagaaaagcctttctcttttttcggtccgagccattcgtccgaaatatctttcagtttggcgataaactctgaggaaaacggcggttccccgacatgaaacgtgtagccttcgcggtcaaatttgttgttaatcgcccgcagacccgcttttttctttcctgacagcgtaaatgcctccatatccacgagcgcctcttctccaagcttgaagaagttatagccgaagtcatgatacagcgccatgtcttcacgttcaatctgatagaacatgacactcaggccctgcttatgcgcctcattcagaaattcctcaattacaagcggaaaagagtctttctggcctgacggatcaccgagcacgacaagccttctggaaatctggccgaacaataaaagtgctttgccgtcgcttgagaaataaaaccgcttatccccgagaaagccgaggtggctgagcgcgtttccgccttcttccgccaaaaaggacttcagccgctcaggatcggcctcttccccgatcggcttcgatcttttatgataaattgccgtaaacacaaggaaaaacaaaggcacaacaataatggccgtcatcgtggcgtatgtaatgtgcgaattgttatggacgaaataatcgtggcgcagcagccgattcattttatcccagataaagccggcaatgagattgtagttgaacaaggcgataataaacagagcggccgcaaaaatcatctggccgagcgtatacgatgcctgttctctgataaactgcctctttaacagcacaagcaatacgataacgacaggcagaataaagatcgcgctgatgttcaacccttttaagaaactgaacacaaaaccgccgacaagcgcggcgaccgccattgaataagagcgtttcgtccgtttgtatagttcaatcggcaaaattaaaagaatcaaagccgcgcttaacgataacgcgttaaacgcaagaagcgccggatgcggaatatgcggaatgaccgtctccctgtcgatcggcaaggcgacagacgcaagcacgacgactcccgacacgaaaaccaaaagcgccagcgaaccgtaaagcattctgattaagatggcgcgctgcaatacgagaagcacgttcgtcgtttccacggcaggagccatcttcggatttgattccagccgtttaagcgtattttccgttaagtcgccggccgcaaagaacagcccgaacacaaacggaataaatgaatacacaatccggtagatgacgatggatgtcacaaccgcctcctgcggaaagcccatattctgcatgccgagcagaaacagaaggtcaaacgagccgaatcctcccggcacaaggctgatgattcccccgatagcggcaatggcaaatacaccgaatacatggcggacatctgcttgaatgcccatgacatacagtgaataatacatgacgacggctgccgcaaaccattcggcaaacgatgctccgatgtatgaaaaaaccggatgcctcggcttggcttcaccatcttctgtgtcagcttttttattgttgatccgggcggcgattaaagctgccggcacaatcagcgccacaccggcgatgacagcccacagccacggcttctcgcttgtgatttcacccaccgggagcacccgggcgacggtcagaatactgaagaccgacagcccgagcagagctgaagaagtaagccaagcgattcctgcgacaagacgttttacgtcattcgtgtgctctttgtaaagcatcgtccgcagtccgacacccgccagaccgccgaatccaaggacattgttaaaggaattggcgataaaggaaaccctgaacactttccaattcggaatgttgagacgcagcgttcgtttcagcacaaagtcataaaaggacatcgcactgacggcaaggaggccgagcagaacgagaataaataaatcgtaacgctcaatcccgttaataatgtacagcgtgcgtttaaaagaaaggtctgtcaattcctttttggactgataaatgactaaaagcaaaactgcaataggaaataatacttttaatatcgataaggcattctttttagtcagcaatgttctctccaatcatcataaaatagcttatttattataattcccccaataatctccaacatattatacactaccacctcatattcaaacaaaactcgtctgcaactttctttctcagattaaaatcagtaatatgggatacaggagtattaacgaggaagtgagacgatggattataatctgcatgatacaacggtattaggcggcgatattttttctcctgaggaacgggatatttgggttttgtatatgaaagtgatgacatcggcgggactcggcgatgtgtcagagtggatgaagcttgatatgagcatgccgcaaatgaaggtgctgatgcttctgaacaaccacgggacactgaaggtgagtgaaatcgcggaaaaaatgggcgcttctctttcaaatacgacggggctgcttgaccgtttggaaaaatcaagtttcattacacgcgctccgtcagaagaagaccgccgttcagtcgtcgttcaattaacggaaaatgcaaaagatattttccgcagcctttatcaaaaaggacatgtaaaattgaagcgttcattggaaacgctgaccgctgaagaaaaacaaacggtcaatcaagggctcgccattttggcaagagcgcttggatcttccaatcaggcatagagatgaaaaaggcctgccggtatcggcggcctttttttgtttgacatttaattcattcaaagtgaataatatattcaaagtgaattaaaaatggaaggattgatcaatatgccggagccattgcaaacagaaaaaaaccagagctgggccatcaccctctttacgatcggtgtgttcatggcggcgctggacaacggaattatttccgctgctctgacgacgattaacagctcttttgatgtttccccttcatggggctcgtggggagtaaccctttacacattgggactcagtgtcagtgtgccgattgtcggcaagctgtctgaccggtacgggcggaaaaagctgtttatgattgaagtcgggttgttcggcctcggctctttgcttgtcgcactcagtcaaagcttcccgatgtttttggcggcaaggctcattcaggcgcttggcggcggagggatttttattatcggcagttcgcatgtcttggctgtgctaccgaaggagaaacagggaaaagctctcgggcttttaggagcgatgaacggtatggcggccgtcctcggaccgaatatcggaagctttttgcttgatgtaaccgggtcgtggcattggctgtttttgattaatctgccgattgccgccgctttggttgtgtgcggcggtttgtttatcactgaaacgaaagagcctgaggtgaaaaagcttgatctcttcggcacgatgatgctgtcttttgcgatcttatcctgcatgatcggtattacgaacctcgatggggcgaagctgtcagaaagcataatggacgtaaaggtgtacgggtatctgttgggggcgggacttctctttgccgcgctgcttaaagtcgaaaagcgggttgaaaaccgcgggggtgatccgattctcgcctgctcgctgctgcagaataaagtgtttcaatggacgctcgtcatcggatttttatcaggcgggctgctcgctgcggtgatttttattccttcttacgcggagcagtatttgcacgtatcggcggaaaaagcaggttattggatgacgccgctcgctttggcgtcaggcatcggggcatggctcggcggggcggttacggataaaaaagggccggtcttctctgcggttgtatcaggcgccatcgcttttgccggattcagcctgtttccgttatgggtgacggataaatgggaatttgtcacggcgagtgtgattgcggggaccggtttcggatttctgctcggagctccgctgaatgtgcttgtatcagaaacggcgggtcaaaacaaagggacagcgctcggcacgctgtcactcgtgaggcaggtcgggctgacgctcgctccggccttatatgccggcttcattacagccggctttgaccggatcggagatgacatcaaaaaccgtttagcgaaaagcggcattcccgctgatcaggcgcaaatgcccgatatcggcggcggactttcttcgttgcaggaacaggtaagccgaatccccgtccccgccgtcaaaaaagcggtttctgatgcgattgaagcgggcgttgccagcggctaccaccatctttatacggcagccgccgtcatttcgttatgcacgattgtgtctgcggctgttttggcgtatttccggaagccggcatcctctaagaaaaatgccagtccatccgccgggaaagctcagtaatatgggcgatgtgatgttcagagtgccagacatataatccgagcgcctgttccagcgtaaccgtctccttagatacaggatggaaaaatgtccgtttgaattgagcttccgtcatggagcgcaaaagagcggcccaccttctgtgcaggatcgttaacagctcaagcgtatccccgcaagcggcggttttggaatcatggagatcggcccagcctttttcatcataaggacggatttccggttcatcctccgttaagctcaatttaaaccggatatagctgttcatgtggctgtccgccagatggtgaaccacttggcgcacagtccatcccccttcgcggtacggcgtatcgagctgactgtccgacatctctctgacagcttgtttcagtttggccggagcgtgttccagcgtattgatccattcttgtttctgtccggccgaaatcgattcaggcggctgatattctccaatcggatagctgagggtttgtgtttccatattgttcatctcccattgatcgtattaagaaagtatgatggtgatgtcgcagccttccgctttcgcttcacggaaaacctgaagcacactctcggcgccattttcagtcagctgcttgctttgttcaaactgcctccattccaaaacgagcgggtactccacccatccggtcagacaatcccataaagcgtccaggttttcaccgtagtattccggaagggcaagctcctttttcaatgtctggtggaggtcgctgatacttctgatttgttccccgttaatgactgcttttttcatgtgcggctcctttcttatgattttattctatcagtttaccatttttctcttcagaaatggccggattctgccccggtttcagctggacgatgtcctcctgtctcggacggctgcagattggatttgcccggctgcgctgcttttttaacagagctgatccatataaagaaggcggccgaaacgccgccttttttcagactgtgcggcccggggacgccgccgtgcttcttttgctgtgcttcggctgatacacttttccgacaaacaggtatccgtacctgaaatggttgcatccccacgatacgaaaatgggaccgagcgtgcagatcaaaaataacagcaggatggcagccggcaagggcattgaccgcagatagctttccaggaggtacccgctgattaaaaagtaggagtggagcagatagattgaaaacgaatagttgctgatcatcatcaccatcgcgggcactttattgagctttgaaaacagatgaaagcacagaaaaataatactgaccgcataaatcataatatccggacgcttagaagaaatggagccgccgctgacatatgaaacggccacaatcaatatcgccgatacggccgcactgaagtaaaccgcatagcggtactgattgatgagcgctaaaaaacgccggtattcctttccgcaataaaatgccagacagaaataaaacagccagcccggaaacggaacccaaaagaacggaaaaatagaatcaagccccgatgacgccggcggatgaagaattgaaaaatagccgagatagacggcattgatgataaaagaaacagacagcacccatgcgggagatgttttgttcagccagcggtgcagcagcatatggagaatgtaaaattgaaagatcacaagaatgaagtagccgataaagtttcccaaaaagacattttctaaaaatttacccatcactgaaacgaaaccggcgccttcttctgccacgcttttcattaaaatggcatccaccgcggcaataaacagaaacggcacgaaaatgacttttccccttttctttaagaaacccgcgggcacgccttccggataggacctggcaagcagaaattccgagataaagataaacgccggcgtgctgaacatcagcaaggtccggaacgcatcaaccgtatgggcggcgcttgctaaggactcttcctgaatcatcagcaccattgacatcacgtgcagcagaacgacacttaagcaggacaggcagcggatcacgaaaatttcttttatctgcatgcggccgctcctttttcacaagcacggcggactttggcgtacgcctggcgcagccgcttttcccgcagctcgggtgtgctcgttttgacggcggacataaagttccgttcggctttttgaatgccgcaaaattgcagaatgccttttttcagcgtaatccagtccgcgtttttccggaaccactttaagtgccggttcggggagtccgccgtataaaacacctgtgccgtctctgcccggagcagtccttttacacggccgttttcaaatgtgtaggcttctccggcgacaaacactttgtcaaaaaagcctttcagaatcgccggaacgcctccccaccacagcgggtaaatgaaaatgagatgatccgcttctttcatcagtttccggtatttctttgtttcagcgtcccggttcatatccctccgctttttttcatctccgaccttcagcacgggatcaaattgatcggcgtataagtcaatgacggtatagcttcgtccgctgtcctttaaagccatggcgacgtatttgacgatcgccgcattgaaactgttctcatccggatttgcatacacaatcaccgtcttcatatgtccctcccagtattttttaatttttacaatgattatatcattatgcagtatgaataaggcaaagacatgatgaaaggctttttcgccgactgaaacggcggccttcccttctgtctgtttccggcagcattttgattcgttttaaacaggattgaaatgcggtatccgacacttctgcgtttttaagcagccgtatggtatactagctgtcaaatgaatgggcttggaggacaacatgagaattttaaagtacgcgattttaggacttttgcgaaaaggcgaattgagcggatatgatatatcgagctattttaaagaagagctaggccagttttggagcgcaaagcacagccagatttatccggaattaaaaaagctgacggctgagggattcattacgttccgcactgcgattcagggaacgaagctggagaaaaaaatgtacacgctgactgacaatggagagcgggagctttgtgcatggctgacgaaaaaagatccgattccggaaacggtgaaggatgaatttatgctgaaggcttattttatctcagctttgacgaatgaagaagcggatgagctattcaccgatcagctcgtaaagcgaaaggagaagttgtccgatctggaaaacagttatcatgaactgatgacatcctccgaggaggcggattccttttcttctccggatttcggccattatctcgtgctgacaaaagcgctggagcgggaaaggaattatatttcctggcttgagcatattttggctctcatcaaaaaagcataaacaaaacggggcggctctgtatgcaagccgcctgtttacgttctgagacccgccgtaataaacgaatctgccattaaaataagaaaaagcagactgaaataaacaatcgagtaaaaaaacatccctttcgaccattgcgtgtcatccgctgctcgaaaacctttgacgctccggtacagccagatggctccgagcaggagagcggtcgcggtataaaacgggctgacatcgatataaagagggacgagcagcgaaaccgcagtcagaacggcgatatagcgcagcatttttatttttgtgacacgattgccttttataatcggcaaaagcggaattccggcagcacgatactcttcctttcgcctgattccgatcgcccaaaaatgcggcggctgccacaaaaacataatcgcatataacaacaccgccggcatatcaatgtacccggtcagggcgcaatagccgatcaagggcggagccgcccccggaaagctgccgacaaatgtgcccagacggattgtcttttaaaccaaagcgtataaacgacggcatacagcaaaaatgcaagcaggccgagaacggcggtcagtacatgaagcgaagcaagcatgatgaatccgcatgcgccgagacaggcgccgtataggatcataaccggcggcggtattttacccgtgacgcttgcacgggtgcgggttcgcgccatcttggcatccatgccgcggtcaaagaagttattaaaaacagtgcttgatgccatgacaagcgccgttccgatcatggcgatcgtcatagcggcaaatataccgggcccttcgcccgtcctttcagactgaagccatgcgatccaaaatccgcccaatgcggcgagtgaatttgagatgataattcccggtttggcaagaatgataaagtccttgaccgtcacccggtttccgttatgcttcatcggctgttccgtccgtgctgcatttgaattcatttgttcgggttctcctttttcggcttatcatatcaggaagaatcaggaatcacaattcattctgtatatttttcacacaattgtaaattatatataaaaagccgcatcttgaccggatgcggctcatttcctttactattcaaaatctgcccataaaactccctgatccggcttgaagcgagcagatcaatttcaaacacgggcattaagaaggctaatcccgtatcgtttttgttttcggggaagttttcaaataaaaaaccttgccattgatggcaaggtttttttcttacagtgtaaatgcgatatccgcccctgacacagggtctttgacgaatatgccatcgtttttttcttcaatttcaaagccggcatcagtcagcgcttttgtcacacgtgacagctcttcatgatgcggaagcacgatggtgtaataatccagcccgcttgcgtttcccggtttcggcggcgcgtgttttccggcccatatattcagaccgatgtgatggtgatatcctcccgctgaaacaaacagcgcggacatggccgcgtaattgccgacaatgtcaaaaccgagaatatcggtgtaaaaagccttggcttcctgtaaatccgtcacatggagatgaatgtgcccgataacggttccttccgggagacggcttttccgttcagctccggcttcttccaaaagcccgtccacatcgacgggcgccgtttgcatgacgtaattgccctctgcatcgcgctgccacgtgctgcggggacgatcggcgtatatttcaatgccgtttccgtccggatcagacaggtaaagagcctcactgaccgcgtgatccccctgaccgagcgcgatgccgttttcaatcagccgggccaatgcgatgccgagttctttccgatcaggcagaagaatcgcgaaatggtaaaggccggtgacagaccgctccggcagaatgacggcgcctggattttcttcaagcaccagcaggacgcgttttccgtctgctgacagttctgcggaacgatcggtttgcgagatgacttgaaagccgatcacattttgataaaagtcgagcgaccgctccatatttttgatggtcaatttgacataacccagtgccgtatcttgatgaatgccggtcatctgaacgccttctttcttatgctgaaaaagtttctcccttttttgatttgaaaaggagctgatccaatgaaagcagacggcttcctgaaagcgctaagtgaattgacgcaaccagcaagatgaaatcaaattccgatccgcccataaacggtgaggaaagcttcgccgtgaagatggcgccgactaatgtgatggcaaacagaacgccgataatgcgcgttgccaagccgaaaaagatcagaaccccgccaaccagttcaatcgttgcgatgacatagaccataaaggccggaatcccgatgctctggaaaaattgcgttgtgccttctaaaccttgaaacttggataaaccgtgaacaaaaaagataatacctgttacaactcttaaaagcagtgttcctgtttcgaatgatttattcataaaatcctccttgaaaattattatcacttactttatgtaagctagtatatatacataacttatttacgtcaagtaatttcgttacatttaacgaaaataacttaaaagtactagttatccccgcaaaaaaagacctccgcactctgtcggaggtctttgttcctatttatgattccctgaactggctttcatataattcccggtaaaaaccgttctggctgagaagttcggcatgggttcctttttcagccatttcgccgtctttcagcacaagaatctgatcggctttttgaatcgtattcagcctgtgagcgatgatgacgcttgttctgcccgccattaaacggccgagcgcttcttgtattttcacttccgtcaccgtatcaatgttgcttgtcgcttcatccaaaatgagcagaaccgggtcggccagcacagctctcgcaatggaaatgagctgtttttggccttggctgatgcccgcgccgttttgggtaagaacggtatcgtagcctttggggagccgttcaatgaatccgtgggcattggcggctttagcggcttcctccacctctaagtcagatgcatccaagcggccgtagcggatattttccctgatggtgccctgaaaaagaaatgaatcctgcaggacaaaccccatattttttctcagactggatctcgtcagttttttgatgtccgttccgtcgataagaattttcccttcattcggctcgtaaaagcgggcgatcagacttgtgacggttgttttacccgctccggtcgggccgacaaaggcgattgactgtccttgcggaacgctgaaggacagatgttttaagatcaggctgtcttcctgatagccgaaggagacatctcggaattcaatctctcccgttttgatcggctggtacagcgcatgctcttcgtcttcccgctcctctttttcatcaagcacgtcaaacacccgttcagccccggcgatggccgataacatcgtgttgaactgattggctaaatcattcagagggcgcgtgaactgccgtgagtattcggcgaatacgacgatggaaccgattgagatccaccctttcagcgcaaacagcccgccgaccgccgctataatcgtaaagcttaaattgtttaaagagttcattactttcggaatgaatcccgaaatggtctgcgcccaaaatcccgatgattttaacgccgcgtttttttctaaaaattgctccatgacgcggtcttccctcgagtaggctttaatgactttcgctcctgatatcgactcttcaataaaaccgttcagctcgccgaggtttttctgttgctgcttaaagagcagtcccgtccggctggtgatccatttaatgctcaaaaacatgatcggaataatcaagagcgtgatcaatgttaaaagcgggctcatgtacagcatgacggcgattgtgccgacgaatgtaatgacgctcgacagcacctgaatgactgatgtatttaaagtggagctgacattttcaatatcattggtgacccggctcatcaagtcgccgagccgctgtttatcaaaaaacggaatcggcagttcatgcagatgagtaaacagctcgctccgcattttaaacacggtgctttgagaaatattgatcatccaatagttttgaaaccataaggacaatgattgcacgaggtaaatcccaaacagtatgaacagcacccccgccaatccgtctgtcgtccgcccgacgatgaaatgatcaatcgctttcccgatgacgaacggtccgaggaggccaaatatggcgcttatgactaccatgatgatcacgagggacaaaagcccttttttctcggctacataagaccagatcctgcgcagcgtgccttttgtatcttttgctttcgcgcgttttctgccgccttcatttgatttgagcggtattttcggatatcggaaaggtttacgaatgtctttctgcactgtcagctccctcctttccgaattgtgattcataaatctgccggtacaaatgagactctgccatcagctcttggtgcgtgccttttgccagcagctcgccgtcttcaagcaataagatggtgtcagcctttatcgcggtcgttattttttgtgtaataatcagtgtcgtacattcataagacctgatcgcctttaaaagctttgcttccgtctgaagatccagcgcgctcgtactgtcatctaacagcaggagggacggctttctgataaaagcgcgcgcgatggaaatacgctgcttctgcccgcctgacaaattgacgccccgctgtcccagcaccgtgtcgtatccgtttgacagcttcataatggtttcatggatttgcgcgtctttggccgcttccattacttcatctagtgaagcatcctcccgcccccatgcgatattttcacggattgtgcctgaaaacaggagtacttcctgcggaacatagccgatttccctgcgcagtccatgagcggagaattcactgatcggtttgccgtcaatgaaaatactgcccgaatcagccgtgtacaggcgcggaatcagctgaaagagcgttgattttcctgagcccgtcgcgcccataatggcaaccgtctctttcggattggcagaaaaggaaacgtgatgcagcgcgtctttttccatgcccggatagcggaaggacacttcgcgaaactcaacgccgccttcaagcgtctgtgccgggtcgtgccccgtcccctcgccgccttctgtttccagcacctcgccgattctttctccggaagctttcgcccgggaaaataccatgataagaaaaggaaggacggacagcgcgcctgtaatccgcgtcgcatagttaatgacggaaacgacatcgccgacctgcgctccggcctgatcaatgcttttggcgccgaaccataagataaataaaatgcaaatgttcatcaacagcattaagatcggcatcgccgcttccacgagccgaaaagcggagactgtcttttccatcagcttcgtatttgattgcaaaaaacgtttcacttcgtggtttgcacggaggagcgctttaatcagtttgatcgccgtcaggttttcctgcatgatcgtgttgacctgatcgagccgcttttgtacagatcgaaacagcgcgccgcctcttttcagcacccacagtaaaaacaaaagtaaaatcggcaccgtgaccagcagaaaaaacccgagtttcgcattgacggtcagcgagagaataataccgcccgcgatcattaacggcgcccggagcataaatcggagactcataaaaagcatattctggacctgcgtcacatcgtttgtcagcctagtgataaatgatgtggatgagaattgcgcaaacgtcgaataggagaaggattgaattttttgaaaaagtccttttcgcgtatcatacgcatagctctggctgatatgggcggagtagaaagaatttaaaatgcccgaggcgaatgaaacaacggtcagtccgatcatcacgccgccccacagccagaccgttccgagctcctgcttcaaaattccttcgtcaatgattttcccgatcagcaggggctgtatcagctctaccgcaagctcgatgagcatgaaaaacagagcgatccccgccaacagagaatacggttttacatatgataaagcctttgacatgtgtaagcctccaaattctttgttcagttgtatgtatatttattttatttgtttgtcgtaaatgaataaaggattaacccttgaacccgcacttttattatgtactttatgaagaaaaaacggaaatcattgaagaccaaaattgaagaataagggatgcagatatatggaggctgtcttttctttttaccagctttctgaaccggagccttgattttaaaatgaattagcggagcctttaaaaaggcgtccgctagtcatttatgctttgtcatttcatttaacgaataaaaacgagagcgaccccgaatcctttatcagcatcaaactctttgatcactttcatgacctgccagcgctggtctggagaatcggattttgtggcaatcccattatgagcgtgaataaaatctcccgcttccacagtctcatcgcatctgacaaatacctgaccgataagcccgacaatgttccactcgtctctttcttgtcttgaagcgtagtcttcttcaggccgaaagtccggattttcttttggcgccatgaccgtatggccgtttgcatctttctgttcttcataaacatagccgccaaactcattctttacgtatcgtcccgaccagtgaaaactcgactcaccaagaattactccggcagtctcggaaataaccccaagcatgagatcacccttttcagccggtctgatcttatcaccttcaagtgtgacaagtgttcccgtcggaatcttctccccgctcaggctctcaaagtactcagcgtagtcagagaaggtcgaggaacctgttacgcctcccgaagccttaattgttccttcttttgcgtgaagctcaatttttctgtttgccgatgacggagtgctgccggcaccccagccccatacagttgagttagcttgtgggttaatcgtattatatgaaccgattaccccggattgagaaccacctgcagcctgtccccggacagaaccgacgacaaagccattagttcctgtaacgtgggaatctttagatgccataacagaagatcctttatgtttaaacaactcatacggtgtttttttaccgcctacattaaatgttgtttcatatccctgaaaatcaatatttgatatattcagatccggacccgaagaatagagtccgaccgttccgctgctggctcccaatctatgcccgtatacattgctcactgtgcaattatcaacgccgccgccaaaagcaagacccgtcgtgccgccgtcaactagaaaaacgccgtcaatcatgcactttcctaccgcattttctccgccgagaacataaagatcatgagcagcggagcggaacccgcggaccgtaatattcttcagattgacataccgtcctttgtaataaatcataatgatcgtgtcattgctgtaatcatatgatcgatcttcacaaatcgcctggaaattcactatattaactgaatcatagcccgaaacaaccaaagcactcgctccgacgcctttatatatagaattttgtttaggatttgttgcctggcaatttactaattgaacatcatgggcagtttttgatgtcggctcagtcgataaatggtggccaatatgtctaatacaaaaaccaatggcattttcgtaagcacggcaattagctagctgaacccgtttagctgccggtgcatagtcatgcgccttaatttcaaaaccgcgggcgccgccaattgcaacacagctatctacaaatacatcttgggaaccgtcatcgatctcaaagcaatttgaatttgacgtgccattcccatttcccatcgggtgataggaaatacaatgacaaaaagtagtatggtacccgaaatgacaagtaaagttatcatcgccggaccctgttgcttcacaatgagaaaacgttacaaagttacagccattgggctgataataagtcgggtcgtccatttctccatgtctgttatagttcgggcttgtagaatcaaagccgtgcaggccgccgttcttcgcaaacacatgttcgacaaaagaatagtccacattcgcaaaaagcagacagcttgaagtgggccctttcggaatcttccagccggcaggacgcgtatccttattccagtccagcgtgagatggccgacgtaaatattttcattaccgttcgtatagtcactgttggtcagaacagaacggccgacaggtgtttcgtctaataacttaatgaccgttcttttcttacctgctccgacaagcattgtatttgacggaacaaacaatcccgatgttctgaatacacctgcgggaacggttacgacataacctccgtcggccatcgcatcatgaaatgcttgcgtatcatctgttactccgtcacctttagccccaaaatccataacgtttcgctctgtaacgtgttcaaacctgttttcatacattttaagtctttcgtttaagttttcataagttgacgtgccatcgttaagggcggcaccgattttgctgtcaatcgcttcaaagttttgagcaatgctttcaacttcaacaccctcagttttatcaggtttgtaaagtcctaagaaagtcgtatagtttgtcattggtttgcctcctatttttaattgctaattaaaacaccgaacatcacagaagtcattcactcctgcatgtacaggtggcaaaggtatgacaaattcagacattttttcaacacacataaaaagagcgccggataaaccagcgctcttcccgttctgcacacagcctgctgctgcggtatgctaaccgttcagtattttctcaacacgctcccgcatttgcggcacgcctaatccgacgatgacctgaagcgccctgccttttctgacgacgccgtgggcgcccagctctctgaaatcggcatcacttttgacttttgaatcatcagcgacagtgacgcggagacgggtggcgcaattggtgacctccataatattgtcttttccgccaagcgcctcaatatacaaagcggctgtatcccgctgtgtttcgtctgccgccgctgtttcttttgaagcctgcttccgttctctgtactcctttttcgaatagagctttgtttcctgcccttcttctttttctctgcccggtgtggcgatgttgaatttgagaatgaggaaacggaagacgaaaaagtaaatggcggtaaagcacaatccgatgatgatctggtatacatacgtcatgccgtggcttgacgccagcgggatccagtttaaggtcgccgtttcaatcaagccgccgcccatatttccgacgacgccggccatatacatgacggttgccatagaagcggcaagcaaagcgtgaaccgcaaataaaaacggcgagataaaaaggaatgtaaattcaatcggctccgtaatcccggcgataatggatgtcaaggtgaccggaatcaacaggccggcgacgatttttttcttttcctttgaagccgtggcgtaaaaggcgagcgcgattcccggaatgccgaagattttcgagttgccgtgaagtgcgaagcccccctgcgggaacaattctttcagcggtttgacgctttgggagtattctccgagatgctgcgcccaataggtgacgataccgccttcagccacagccggaccgtaaacaaacggcgagtaaataaaatgatgcaggcccgtcggaattaagatccgctccaagaatgtgtaaatccacacgccgattgccccggaagaaacgagaaagctttgcagtgatccgattccggactgaaccatcggccatacgtatgccaccgcgagtgaaatcggtatcataatgaaaaaagaaataatgacgatgtacgaagatccttgaaaaattcccaggaaatccggcagttttttatcaaaataccgattgtgcaaataaacgacaatagatgaaataaagatggcgccgataatattcgtatcaagcgttttgatgccggcgatcatcgtcagcccgctcgttccgccgacttcctgattcatatcgacatgaaaagccccgccccaaaccgtcagaatcgcattgataaagtaattgaatgtcagatatactgtaagcgcttccaaacaagcccgcgcctgcgcttttttcgctaaagcgacaggtatgccgatcgcaaacaggagcggcatttgattaaagacggtccagccgccctgttcaatgacgtaccagcattgataccaaagcccgtcaggatcacccagcggccccatcagtgttttatttttaaagagcgtactcagaccgacaataatgccggaaaatgcaaataacaaaacaggcacaaacatcgcgctgccgaagcgctggactttttgcatcatttcatgtgacctcccgctatttatcaaaattttcaagctcttcataatcaacatatgcacggaataacgcttcgcccaccagaaaaaacggggcaaatgcgacgatttccgttttatcgcttaacgtcaccggcttgctggtcgcataaaggttatacggcgttgtttgcgccagtacgttgtttttcagattggtgattgaaataaacggaactccctttgcggacagggtccttacctgcggaattaattcgggtgtttccccggataaagaaatgatgatgaatacgtcatcgaccttaaaatcgtcacacatgatatcaaactctgtgatgtcctgaattaaaatcagatacttccgccgggatacaaacatccgctgcagctcacgggcgcacaccctctgagccgtgcccgatccgtaaacgaaaatccgttttgcttcatctatcagccggcacatctccgtcatatcttttgacttcacgtattttacgttggcttcaatatcatccagaagcttttcaaacgtcatattctcgccctcttcaggctgatcctcccatttcagaaaaacccggaattcactgtagccgctgaagccgagtttttgggccagccgcaggatggaagaccgagagacattgcaggctttcgccatatcattgataccgagatggtagcacgtatgcttattgttcaatatatattttaaaatataaaaatcgttgtcatttaatttcgcgtaatgctgattaaccagttcttcaagactcattccaaaatccccccgttttctttctattatatagaataacagatgaagaaaacggggaagattgtcatcaggaaatatgcgacggacttacgtcaagctcaggccagtagtctttattagcctccatcagatcttcaaggatcagtcttgccacacgggcattcggcactgtttttgacaggatcagcgcctgccacagcttttgaaatgaccgttcttcccaagcttcaaccgtcagtttttcgacagataactgctgctccatcaggcctttttgaaattgcggaatgttcccgactgagagcggttccggtccgtttgaacctacgagacaaggaatctcaaccatggctgatgaatcaaagtttgcgatcgcgccgttattttcaacgattaacagcattctctccccggtgttgtaagcgatggcccgggcaaggtcgacgatataggaagcatgatcgtcaattttaatttcactgttttccgacgactgttcacgtgtaatcatgtcacattggctgaagatgaaagcttcgcgcccttccatgacttcgttggctctcgtatgattcggatttgattttttcaccatatcatccgggaataagtaatattgcagatacgtgttcggaagcgtatccggatcggccgcctgaacatcgcgcgcttttttgaatgtgtcattccagcttgcttcagtctgctctgcctctgtcttcggaacgtagccatattcacggacatgctctttcagcttcggcattaaatcattgccgtgctgatctgtaatggaagtccaccagccgaagtggttcaagccgtaatagcggacgttcatttcttttcgggaagataatccgaggatgttcgccatgcgatcctcaattccgaccggcatgtcgcagatgttcaatatttttgaattcggtctgaggcgccgtgtagcctcagccacaatcgccgccggattggagtaattcagcatccatgcgtcaggcgagtacgtttccatataatcaagaatttccagaacgccgccgatagaccgcatgccgtatgcaattccgcccggcccgcatgtttcctgtccgaccacgccatacttcagcgggatttgttcatcaagcgcgcgcatcgcatatttcccgacgcggatatgcgccatgacgaaatcaacatccgtaaaagccgtctctgggtcatcagtcgccaaaaattcaatgtccggcgctttttcttttaagaatacctcacacgcacccgcaatccgctcctgcctttctttatcattgtcataaagtttcagctttctgatcggaaactcttccaggtgattcaaaagcattaatacaattccgggggtaaatgtgctgccgccgcctgcaataacgattgagaatgatttgtctgtcatgtgaagccctcctctgataacgtttacattttatttatatcatgagaacggcttctctgtaccgggtttgggggagttagatcatttaatcatttttagttatttttctcaaaaagcgggaaagttctcacaggaacataaaaggtctgctttgatcagcagaccttttctcaaaaatgctcttgtaaatcagaaagcagcacttcctgctcaaattgaggatttccgaccggaaaaatcctggctgtttctttgtcttcgttgacatgctgaatataaatcgggactccttcatacgtcacatacgccatggcggcggattcagcaatgtctttcgcacgctgtgtattcacgtctcaaacctcctttgggcctcacacataacgtgtccggcagccaagagaagtatgcttgtttcttacaattgtccggcggtgagtttgaattttttgaggcgtttgtaaaacgtgctacgcggaatccccgcaattttggcggcctgcgtgacatttcccttcgccgattcaagcgcgtttacgatcatgtttttctgaatgtgctcccgtatagagacaggaggcgcttcttcttgttcaaaaggctgggccgcctctttaagacctgacgcttcaagcagggatgcgaggggacgtccggacagccgtccgtccgggaacatgacggaaagacgttcaaacacattaaacaattctctgatattccccggccatttccagccctttaatatgtctaaaaagtcatcaggaagctctcccggccacctgctgtttcgctgaaattcaaagaagaggccgggaatgtcttcagtgcgttctcttaatggcggaagatgaatcggacagacgtgaagccggtaaaataaatcttctctcagctttttgctttcgacaagctgtctcagatcagtgtgtgcggcggtgatgattctgatgtcgatgggaatttcttttgtcccgccgaccggggtgactttccgttcctgcagcacccgtaacaaagccacttgcatggaatgtgatatttctccgatttcatcgaggaaaagcgtgcctttatcggctttttgcaaagcgccgatctgtcctttccgtttcgctccggtgaaggcgccttccatatagccgaacagttcgctttcaatcagcttttcggggaccgctccgcagttgacggcgataaacgggccgttctttctggagctgttgttatgaatcgcccgggcggcaacctcctttcccgtgccggtttcccctgtcagacagacggttgcgtccgttcgggcgacaagcttcagctgctgcagcatatttcgggatgaccggcttttgcctgcggcaccatgaaatataaaagccggcttttcttcccgtttggttacataaaagcatgtgaagccgttctcctcccgtttcgcctgcttgatttgaaagccctgttcctcaagctcacgcagcatatgtccggtaaaatgctgaacgggggggcttgcggcgataatccggttgatttcattacaaagcacgattggctcacgagaccgggtaagcccggcgaatttgctgatcatgtcaagctctgtcatcttcatctttaaggcaagctcccgttccgccgtataggcgatggaggaagcaattccgagcataaaaggctgagcgcgggaggcggggcaggaaatatcaatgacacccgccagccgcccgtcttcataacggatcggcgcggcggaacagctccattgatgggaagcgagcgaataatgttcagaaccgtgtaccatgaccggctcatttgtataaagagccgtaccgatcgcattcgtgccgaccgccttttctgtccagcaggcgccttttaagaaattgatgcggttcgcttcatgaatggtgcgcgggtggccgtcaactgaatggacaacgccgtcggcatcaatcaggagaaccatcatttccatttcccgcatcgccgttttcattttttctgcatacggtgccgaggccgctaagaataacgcatgcttctcggcctgcctttctaaatgatctgccggcatcacattcggccccttttcaagataaggattgacatcagcttttttgcagcggtgccatgaggcggccacccgcttctgaatacaggattcatcaagcacgccttctttcacaaagcgcttccaggttttaaaatcattccgaatgacattcattgtattcgctcccccctgttcagaccatcttttcatatattgtaggggaaaagtaaagcgctttcaacgaaaaataccccttctcagtcctgagaaagggtatcccggctatacggaatgcacagcgaggccggtgacattcagaagggcttcctgaagcgtttccgaaagagtcggatgcgcggtgataaagtgctccgacatatccgccgtcatttcgccgttcatcagcatgaccgcctgcccgatcaattccgtcacgtcaggcccgatcattgacaccccgacaatttctccgaattccggttcggcgatgattttcattttgcctccatgctgatgtttaattaatgccttgccgttagcggaaaatgaacattctccgatttttacatctccgtatttctctctcgcctgtatttccgtcagcccgacagcggccatttccggagatgtataaatacagcggggcaccgcccgcatattggctttgctgtcctttcccgtggcatgcgaagcggcggtgattccttcatgaatcgcggcatgcgccagctgcattcctccggccgcgtcgccgcacgcgtatatatgcgaaacatttgtctgcatatggtcattgacttcaatgccgcgcggagaataaaggatgccggcctgctccagattcagctcttgcaaacgcggctttctgccgattgcgaccagaatgtgatcagcctgcgcctcaatttcttttccgtcttttgtccacacggcggtttttctttccctgtcaatccgctggaaggaagctttcgtctgaatatcaactccgctgtctcgtaaagagtcttcaaaagcggccgcgatatcttcgtcttctgccgggagcagcctgtcagccgattcaatcatcgtcactttcgttttaaaacggctgaataaagaggcaaactcacagccgatcacacctccgccgacaatgagaagggaggacggaatctgctgtaaagaaaggacatctttgctgtcgatcacccaatcgccgtcaaagggggcaaaaggcagccccgcgggttcagaccctgatgcgatcaatatccggccggcttccagaatttctttttcgcctccttccccttcaatcagcaaagtttgatctgagagaaatgaagcagtgccgctgatgactctaattttatttgctttcattaagtattgaatgccctgcacgagccggttgacgatttgccgtttgcgcccctgcatccgggcccaattgagcgtaatgttttgcggaagttcgatgccgaatgtatttgcgtgcctgattttatcaagcacattcgcgctttccaacagcgactttgtcgggatgcacccctcattgagacacgtgcccccgagcggccctttgtctatcagaacgacttctgctcccctccgcgcggcagccacggcagctgcatatccggcaggccctcctccgataatggctagtgtcaatctcttcacccctctctataaaatcaatccggccggctcttcaagcagcgctttaaccgttttcaggaagtccgcagccggagcaccgtcacatactctgtgatcaaaggtgaggctcagcggcagcacggtgcttttgacaagctcatctcctttgaacgccggcgtttcatagcttgcgcccactccgagaataccggcttcaggcggattaaggatcggggtgaaatgttcaattccatatcccccgagatttgtaatagaaaaagtcgacccgtgaagatcatctccggaagcatttccttcccgcgcccggcgtgcagatgtgctgatttgatccgcaagctcaaggaatgaaagcttttccgcatcacggatcaccggcacgacaaggccgttttcaagagaaactgccatcccgagatggacatgcggataggtaatgatccgctcctcttgataagagctgttcagctcaggatgctgtttcagcgcaagcaccgcggcccgggatacaaaatgcgtgaccgtcagtttaacaccgctccgctttttcgcactgtcggccagctgtttctgccatttcacaagctccgtaatgtccgctttcatggtcagtgtcagctgggcgctgttttgcaggcttttgtgcattcggtctgcaatcacttttctcattgctgaggccggttttccctccggctgtgccgtctgaaccgaagaccgcggttcagcttccgtcttcatcgcctttatgacgtcggcttttacgattctgcccccgggccccgtcccgttcagcgtatcaactttcaatcctgccttctccgccatttttcgggccacaggggatattttcacgcggtgtttacgctctttcccggctttgggagcgggaatagtttcaggttctgcttgtggttccccggcattttcaggggccggtgcctccttctcctgcaccttttcaccgttttccccgatataacagatggccgttcccggcggaactccttctccctctttgactttaatgtgaaggagcgtgccgctttcgggcgcttctacttccatttctattttttcagagttgatgctggcgatgctttctcccttttcaaccggatcgccgactttcttattccagactgatacttcaccttgcttcatcgccattcccaatttcggcattactacttttacagccatactatatccctcctttaattcattgccggctcgccaagcaattcaagcgtgacgctgacaatttgatctgatgtcggcaaatattgatcttcaagcactggcgaaaacggtactggtgtatgcggcgctgtaattcgtttaatcggcgcatcaagcaaatcaaagcccttgtcggcgacaatcgctgcaatatccgtagcgatgctgcagcgcggattggcttcgtcaatgatgatcagccggtttgttttttctaacgatgtgaaaatcgcttcctcatccaaaggagacagacttcggggatcaagcacctcagcctcgatgcctttctcagaaagctgtgcggccgcttcaagcgcggtattgacctgtttgccgattgcaaacagcgtgatgtcgccgccttcacgtttgatatccgcttttccgagcgggattgtataatatccttccggcacctcgcctttcatgctgtaggacgttttgtcttcaaaaaagaataccggatcattgtcttctattgccgccagcagcaggcctttggcgtcatacggattggacggaacaactgtcttcagacccgggatgctggtgaaaaggccatacagcgcctgtgaatgctgggcagctgcccggaacccagctccgtatgtggtgcggacggtaatcggcacttgcgcttttccgccgaacatatagcggaatttcgccccttggttgatcacctggtcaaagcacgtgccgataaaatcattaaacatcagctccgcaatcggtctcagcccggttgatgccgcagccatagccgcacccatgtagcccgcctcggaaatcggtgtgtccagcactcggctgcgtccgaattcctgtacgagcccctttgtgacccccagtacaccgccccatgcttcatcatcctgtaaatgatcgacagccgctcccccggcgacatcctcaccgattaaaagcacattttcgtctcttctcatcgcaagcttcattgcttcattgatcgcgtctgacatgcttatgactctcgccatctcacattcctcctttttcatatgacacgtagacgtctgtcaacagctctgactctttcggatatggactgtcttcactgaacgagacggctttttcaatcgattcgctgacacgctgttcgatgtcggacagtttattggcatctgtttcttttaaaagatagtttttaaagccttgaatcgcatccttttctttaatatgctcagtcctttcatcctttgttttataggtttgggcatctccttcgaaatggccgtagtttctgtaggtcatacattcaatcaaagacgggccaccgccgtttcttgctctttctatcgcttcctcggctgcctggtaaactgctaaaatatcttttccgtccaccttgacccccggcatgttataggcagccgcccgatcagcgattgaatcacaggctgacgcgtactcaaatgttgtggcttcgccgtagccgttgttttcggcaacaaatacgacaggaaggttccatactgccgctaagttcagcccttcatggaaggtgccttggttatttgctccgtctccaaaaaagcaaacgcttacattgttagtctgtttatatttagcggtgagcgctgagccgcatgcgagcgtaaatccgcccccgacgattccatttgcccctagcatccctttattgagatcggcaatgtgcattgaaccgccctttcctttacacagtccggtcgctttcccgaatatttccgccatcatgccatccagatcacagcctttggcgatacaatggccatgtcccctgtgcgtgcttgtaatactgtcgccatcatgtaaatgagcgcacacccctacagctaccgcttcctcaccggcatacaaatggacgaatccgggaagcactccctgtgcgaacagttcatgaactttgtcttcaaagcccctgatttccagcatcttttggtacatccacagcgctttttcctcagttaatgacaagccttctcgttttaacaattccattttttgtgcgcctccttctatttagggttcacattaataaatgcaaaaagtgtgccagctttttgagcccgtaaaatcaatggttttgtttttacactgtgagacagtttgagacaggtgtctcattttgtctcgatctgatccacctgtctcgttttaaggcacacaaaaagaccggacatcacccggtctttgacaatgatcgacgtatttatttcctcggaaatgttttaatcgcttcattcttctgcaccttttgtctgaatggctgttttcagaagaaaatcaattgatatttgacataaccgaaactgccgcccccgtccttctgcatacagtctatcgtgccgtttgcgtatgcatttgctgtgctacagttcttgcttttcttcaactgcccgattcagcgcttgaagcatgtagccaatccctttgtacgaggacagaggccagctgagatgctgatgttctccgatgacggcgtttaggacgcttcggtattttttcccgccaagcatgataagctcttttgtattagaaaagcccttttcataaaattggcggcgcagctcctccgctgtcatgatctccggatggcctgttccaaaagtaacatcgtaattttcgggaacggtatcatcaggacgaaggaatccatgcttcgccgacaaaatcacccactcatcgaaaaatgctttcgcataccgctcgcacgcctgatgaaacgggctgagataagcgtcttccgcccttatcggccctgtatccggatggatgtcccatatttttttcttgccgcatgggatgatgcatagtcgtttcatgtttctctcccttgtgttgtttctcatatcaatgtaccactatccgcttatttctgcatgactaataatcagggtgcaggcggggtaaaggctgcacacaaaaagacccggaattcgtattgaaatccgggccgaatgagaaattgtttatatcactgctgctccatcccatcaagatactttctctcaaagtcatcgagcaatgcacgcacttcatctgttgactttgtgttcatgcattgatttcttaattcacttgctcctcgaaatccgcggagataaatcttgaaaaagcgaggaagaggtttgtatggacgtgcttctaattttgaatatttatcgtgaagatccagatgcagccttaaaagatcaagcaattccttactgctatgctctctcggctccttttcaaaggcgaatggatttgtaaaaatacctcgtccgatcataatcccatcaacaccgtattgttcggcaagttttaagccggtttcccggtcaggaatgtccccattgatcgtcaaaagggtatctggcgctatctcgtcacgaaggttcttgatttccgggatcagctcccaatgcgcatctactttactcatttccgctctggtacgaagatgaatggaaagattggcaatatcctgcttcaatacgtgtgtcagccagccgcgccattcgtctacatccgtgtagccaagtctggtcttcacacttaccggcagtcctcccgctttcgctgcttgtattaattcggctgcaacttcaggacggcagatcaggccgcttccctttccgttccccgccacattaggtacgggacagcccatattgatatccaggcctttaaaccctaattccgccatcccaatgctcatttgacgaaagttttcaggcttgtctccccatatgtgggcaaccatcggctgttcatcctccgtgaaagtcaaacggccgcggacactatcccttccatccggatgacaatagctttctgagtttgtaaactcagtaaaaaacacatcaggcctgcctgcttcacttacgacatggcggaaaacaacatccgtcacatcttccattggtgccagcacaaaaaatggccgtggcaattcacgccagaaattatctatcataataattcatatcctttcattagagactacggctgtatcatgtattccaaaattaaaaaactgaccatgctttccttttacacttatagcacgcgaaagcatttcttatcaaacgatagtaaattttgaacatttcactttttacaagttaaaaagtgaaaaagctaactgaaatagaacagatctaatagaacaccttcattgagttaatgtaatagagtgtcactataaacacagtcaactccttaaccttataataggttcgagagcgaaaaaagtgtgatgattatctacacgtattttttatttatattgtggtttattaatactagcgctgatcttcctctttcttagcagccttacttttaaactttttggataaaaagtattccaacccaaatagaatatcatatgagttctccctattaccaattcaaaataattatcctgttatcgaagagaaaatatttaacactgcaccatatccgtatctcaatatcatttgcggaaaaactaatttcaagagctatttgattaagcaaattgagtttggggtagtatatctgatactcaagagaatgtaaaaagaaaaagccctaacttgccgcttgtgaatcacatggagtaaagaggatgagatgagatgggaagagaaaataaactcgaacttaaaagaattcaagaacttcaatctggatcatttgggatttggcttatggtttagaaataaccaacgaacaagcggcaacctgacaaagattgcttttttctggcctatacagtatatgtactaagggtcgattggctttcaatggtttcgattcggtaatcctgatccagagccaataaaatagactgctgactaagtgtcgcagtcttcattcataagattaataagaaagtgttcattttctttcataattaaataaggcatcagaagttattgctttaatttcgaatatcctttgttataccggtgattatttgtataacagtgaaaacccctaagaaaacagtgacaatattaaaccatggattttcatagaatgaaagatatttttgaaagaaatccagttcaactatgtttgctgggaagccattcatttctctatacttaggaccccatcccgttaattctacaaaattaaaataaagctgtgaaactaaaaatgccaaaaccgtttgaaaccaacttcttttatataacggtcgttttttgtttactttatccatttaattatcagtttccttttctgcaatacttttttagccaagtgtcaatctaaaatcattatattatgaagcatgattgtcgcaataattacttattaaggatataaccattgtaggtattactgtaatagttgttatcgttggtcccacttgcggttccacctcggcactattatttaattgttgtaatgctaatacgttattcataattaatcctccattcttcatttgataaatttaacatttgaatttagtcttacatataaataaagaactaagtcacccacttcattcattttccattgacaataaataagaagtatgggatagtgaaaagaatttatatgaaaactaaatttattccttttttagaaacaggaaaaggattggggtccttttcctgtttaggctttcatataatgtatgaagaccaagcgtacttttttagtgtgtttggtcttttatccgcagttattgctaatagtagatgtgccaactaccgttgtgattagtgtaagtaagccacctttgccttttgaagcttctacttcagttccttcattcagttgttgaagttccaatacatctctcattcaatttcacctcctttttattatttattacaactattgctaatagtagatgtatcgatgagtgttgtcaagaagtgtccacccagctgtttctacttcagcactagaaatatgcagaaaatctttttttgttatgtttggtcttttattagcagttgttgctaatagtagatgtgccaactaccgttgtgattagtgtaagtaagccgcctttgccttttgaagcttctacttcagttccttcatttagttgttgaagttccaatacatctctcattcaatttcacctcctttttattatttattacagctattgctattagtagatgtatcgatgagcgttgtcagaagtgcccacccagctgtttctacttcagcactcgcagaaaatctttttttgttatgtttggtcttttatccgcagttgttgctaatagtagatgtgccaactaccgttgtgattagtgtaagtaagccgcctttgccttttgaagcttctacttcagttccttcactcagttgttgaagttccaatacatctctcattcaatttcacctcctttttattatttattacagctattgctaatagtagatgtaccgatgagtgttgttagaagtgtccacccagctgtttctacttctgaacctttactcaattgttgcaactctagtacttcattcatttgttcatccactcctcttaaatatcttaacagttgttgctaatagtagatgagccaactatcgttgtgattagtgtaagtaagccacctttgccttttgaagcttctacttcagttccttcattcagttgttgaagttccaatacatctttcatttagtttcacctcctttcaagtactctttcttagattatccttctctctcattagcaatgattactaagggtagataatgtaactgaaatagttgttagagtaacagtccatgccgtaggctccacttcagatttttcatcaaattgttgaagtaccagcacctctttcattttcttttctcacctcccttcataagttctgtatattaactgctttaattctaatcttcaatgattatcatcgaatataagtgttagagttttaattgtttaataacaattctttttttgtctttcttaagaaactatcaatttttattattggcaaccaatataacggatttgaaaactggatagagtttatgcccaatattatgccagcacttccggagtagtaatcatctgctaaacgaaagctgaagtttccagggaataatacttgatcatctttgcggataagaaacaattctagttttctcaatgccagctcaatatgctgactgatttcatttttttccttagtcattggcgggattaacaagaaactaccgatcccatcaaacaatccaccgctatatgcgatccttactttatttaaattgattatttgctctaattcttctctaaataaattattattttttacataatttaaataccaaatagcaattcctattccgattgatcccccagataaatagggtaataatcgagggttttgatcatcatatgtttgcaaagtattcgtctcttcatctaccttacaatgttttaaatctcgctcaatatattcttttgattttaaataatatttttcattcttagtaactgaatataatgccgcatagaataaagatattcctgaccaaccatcaatcaaacctataggtactgctgcaaaatcagtcactgataatttatcatcttcaataatccttttttctatctgatcagcaattttttcagaagtaaccaaaaaatcattattattttcttccatgtataagctaattaatgaaagacctattcccgacaatcctgaccttaatgaaatatctttcatatcttcatatgacagattattgaataagtccatagcttgctctatgtatcccaattcatacaatgttgctgcgataccagctcgtcctgtaaataacccaacatcatcattaagaacattcaatttttcaagtaaaacattttcaatccaatcccaaacttccttgctgacgtttccagatctgtacaatgccaatgcagctccagttcccccagttagtacatttaactttccagatggcattacaaattgccgtacatcgccatgaattagcgagctgttgggcaaaatattactctctatactgtttctcaatccttttattacttttgacatgtccatttctttttgtattttactgtcataactattcttgaatatcttttctttggtgtcagataagtatttgtcacatagattttctgtatttacaacatattgatagacatctttgccaaactcgtcctctatccacatatcatgtttctttttaatggtttcttctatatcagcaaccggacctattggcagaatacaaaatcttaaaactttctttagtgcataccaatcacgctctttatgattcttatttttcttatttgtgtagccaattgtttgcaacgctccgttttcttcagagagagcactagcagcctcaaaatcaataatcttaacatttgattcgggggttatcattatattttggggttgtaaatctcccataccaacatctttactatgcactagtttaattgttttgaccaagctattaattatttttttcaccttactaatgtattcatttttatcattttcaacgttgaacggataattgattgcacaccaggtttgaagagttacaccttctacaaactcttcaactaaaaatacatgtttccaagctttaaagtaatcaagtacattaacaacaccttcaacatctgtaagtttatttaatgcttcgtattctatattcaatctatcaatcgcatcattaaattgaccatctaaccctactttaggtcttccttctttgattactacttttttcccatccaatttccttattccagtatatataccgccaccattattaaacctaaggactccttggaactcataatcattaaaattacttacatcttgagtatctaataagttattcttggaatctaaatactgatcaaaatcacttacgaattcaggtattttataatacggctgtctattatccggaattaggtttccattttcgtctttaatacaaagttctcctctttcattgtaaatattcttaaacgcaccatatcggtaatatatattgctgtccttccacgatttatcatttagtatgtatggtccattctcataatgttttaattcttcataaagttcattcaataacctgaagaacatgttattagaggaaggatagatagcgataaattttccagatgaagttcgattaccatgcttcgaattcatattaaatagagattgtttatctttaatatgtttaaatggtatctgatgtttaaatataatttgactcacaacttctaatatatcctgagcattattcattgttgcacttacgtgtattttccagccttgttctttgagggtatgatttggattattataaaacttccatggtgatttgtattctgtactaacagtatagtaatttggtatattatgtacttcatatggatcagtctctgcatttgggcttttctctatatagtattttgaatcttcactcatgtgttggaaataaactaattttttgtccattttgttttcgcctctcttaagccgctcttaattggttaatactaatggatcggtactatcttctttaaactgctgctcacagaattgatgatacaatttatgactattctttaactcccaatgattcccttgacctgtgatctcaccgttttccataaaaatgatattgtcagcatttataatggtggataacctatgtgctattataatagcggttctatccttcataagcttcttcattgcttcgttcacaattcgttcagaatgactgtcaagacttgcagttgcttcatctaaaaagattatatttggattcttcagaaacattctcgcaatagcaattctttgtcgttgtcctcctgataagttcagacctttttctccaatattagtttctaaactgttaggcaattcacttataaattgccatgcatatgccttcttacatgcttctactattcttttttcatttgggggattttctaaaccaaagatgagattgtctctaatagtaccgcttattaaatcatgattctgtgctacatatcctatttggctacgccatgaatttaatgaaaataactcaatattctcgtcaccaaaataaatatttccgctgttgggcttgtagtatctctccagaatagagatgattgtggttttaccactaccactaggacctactaaggcattaacacttcctctttttattattaaattaatatttttcaaggaaaatgctttatcctcattactgtagcaaaatgataaattttcaatcactaaatctttattggtttccgctaattcttttcctttatgctgatcttctccttgctcatatatcaattgagaaattctttctgttgcacctattgtcttttgtatttgagtaaagaatagcccaaagttattaagtggacccatgatatagaacataagtgtcagaaatgctataaacgttcctggcgataaacttccattggctaatttaacccctccgaatccaattatgctaataatgataagcatcatcattaaattaatgatagggtttaaaataaccatccattttgtctgctttaggcctatgcttcttaaagcttcaacatcttcttttcctttttctacttgtaatttttctgcagttgaagatttaaccagtcttattgcagatattgtttcaacagctcttacatttaattcacctgttaagctttgcgtcattttagataatttagataaaattcttcctaaaggtataaaaattaataaataaactggaattgctacgacaatcactagtgtcaattgccaatcatagtaaaacaaccaaaatccacaaaaaagcactattaatatagcattgataaattgcgaaaaagagttacttactaagttgtaaatcaccgtagtatcattaacaaatctacttgctatatccgcagaacgattcttatcgtaaaattctacaggcagtataactatcttttcccataataaatttctgagatttgcgacaacattatatcctactacacttaacatataactaccaactgccccaattactccgctgcttaaaaatatccctagcagtcctaataggtcccacaaattgatcttttcatgaatattgtaatagtctattagactttttaaataatgaggcactaaggtagaagctattgcgcttaatccacttaaaaatattgccaatataaataatcttatattcggtctggttttactcagtaagaagaaaaactctttcgatttaaaattagggttggtcatcattttcacctctttcgtttaattccaatgtctcaactttttatatcgaatgactcttgaaatgacatacgccatatctttcctgattttcctataaacaatatttcacactcaataactgtaagtcaatatataattttacaaattataaaaaaacaggtctttggttatacattattctacttttgtatattacgaaatgtatattcactcttaatatttctgcccacaaaaccataggcgtagtataaaagaataaaaagaaatttaaattaatcatactaaagggacgtttccggggataatcacttctaattagaaaaatatgcattgactgatttacttatattttataaaattgaattaaatatacttatatttcattttttggaatgggagggtgaattatatacaatcttataatgaaatgtataaagagaaaggagtataaaaaatgaagaatttaagaagaatttcgatagttttcatatttgtaattgtatctagtttacaacctgttagctctcgtgctgaagaatcaaatcatgatgaatctatcataattaacctcgactcaaaaattagtgaatcgacaataaacaaggttcaggaaaagtattcaaatatagaaacaaattatattaaagaactagatttattggtaataaataatataaaaccaagccaattctcagcaatcaaagatattgctaaagaaaaattagacgcaaatgaaattattgaggataaagaaatttctcttcctgaaaaaagtaaacagattcctgctaaagtggcatcttcatcacaattcacggaagataatgacactctttatgacagttggttatggaatatcaagcaagttacaaatgattatcgaagttatcagataaataaaggatctcataatacaaaagtagggataatcgattcaggcatagatttcaatcatccagacctcaaaaaaaatattgtagatactggagagtcttttgttccagttgaagataatacacaagacttttatgggcatggaacttctgtggctggaataattgctgctaatggggatgtaaaaggagttggaccaaatcttggtttagtgccgtataaagtatttgataaagacggtaaatctaaaagaagttgggttataagcgcaattgttaaagctacggaagatgatatggacgtaattaatttaagtttatctacttttttatcaaaaaaagataaagatgatagagagactataaaactttttgaaaaagcttttaaattcgctagaaaacacaatactttaattgttgcagcagctggaaaccatggatatgatatctcaaattcaaaaaaacttgcacaacaattaggtaaaccaaaggacaatatcctacatcttcctggtggagataacgatgtaattactgtatctgccaccacagcgcaaaatacaaaagcttcttactcaaattatggaaaaaacatctcaattgcagccccaggtggtgatctggatacaaataagattgatctatatagcttggtatggactacttcccctgtcaatatcccgcaaactccgctaagtaagtcactaggctttcaaaagggatatgaacctactttagggacaagtgtagcagctccaatagtaactgctacagcagccctattaaagacagaatactacgaaaaatatggagaggaaatgccaaatcgtaaggttgaagaaaacttatatcagaacacagaccacgttgaaaacttagataagaatgaagtaggtagcggtatcgtaaatgcttacgaatcattgcttaatattgagagataaaagatattaagcagttctcgaacttcactaaaaatactttgattaataaaaaaagattactagacgataatgatgatgaagtagagatgaaataaattatatttacgggatattgagaataactaaataagttaagttcacaagcaacttaatattactaagttgcttgtgtcatattttatttcagcctgagtattcaattctttagctattgttgatttctttatcgcacaaaacccagcatgtagcagcaccttataaacagaccaattctttcccttgctttaatctatcttcaatagcccacttaccttccttaccctaaatccctctatacgattttgtgtacggactaaattttgattacggaaccatgaaccgactcataaagttctcctaaaatttaagggctcactctagttggttttctttctgtttgtaaaacaattcatactattattactccttctttagcagtcccaaacactctttatctctcttcccaatcaacagtgcttttctcttgttattcggctttattctcggtgttactttgtaataccattcccaatcatacttacaaaatccacgtatgcagcccttttgctgtcctacccaatccaacaattgtctcatcaaaatagggacagcgatacttgaagcaagtaatgtaaactaaaacaagtcgctccaataaatccaattatcagacctctttttatattgcttttcattcaaattcacccttaacaaaccatttcataatcatagtgaacaattagctaattaagcaaaatgtaacgatgccaactattattaatacatgaaaaaatgcacctgtcataggacagttgcaaaggccttactagaactagagcatcagcatgttgtctacgctaagccaaaaagtggttattacattgttgactattatcaaacccctagtccaattaaagatcatattgattttatctgctgatccggataaacgcattgccttatcggcactttaacattgtatgaatcaagcgatagatcattataaggagcaattattcacgtatagttagcaacaggggctttactctttaaaaaaggagtttacaaaatattcacaggagttacaagtattcacgagacttgaacgagtcgttattgctcttcatattttgtctgtaataccgtttccaaacgaaaaaaagaatatgtttatggagcagcatgatagaactttactgttgaatcatgttacagctttaggaattgatctaaaaaatgagggtttccgcacgttttttcagctcttttcgtcagtgaaaataaagttctctgagaaaagacagtcagggcaaaggctccctatgaaaaagacccggaaatcggcaaggttcattctgccgaaatccagatctgatcaggaatcgttttttaattagacgatttcaatacaagcttcgccacagcttccacatgagccgtctgcggaaacatatccacaggctgaatatattcgacgcgatagtccttcgacagcgcctgcaagtctttcgccagtgtggaaggattgcaggatacgtagacgaagcgtttcggttttacttttttgatggtatctaaaaatgttccgtcgcagcccgttctcggcgggtcgacgatgaccacgtctgggcggaagccttctttcgtccatttcgggagccagtgttcagctgttcctgtgacatatgccgcgtttttgatgccgtgttttttggcgttcttcttcgcatcgtcaattgattctttaatgacgtccatgccgcggatctctttcgccccgcttgagacccacatgccgatcgtaccgacgccgcaatatgcgtcaacgactttttcttttccggtcagctgcgccgcttttttcacttcgtcatacagcttgaccgtctgctcagggttgagctggaagaaagcgcgggcgcttaattcaaatgacacgtcaccaagtacctcttgaatggcatggcttccggccagcgcttttgttttgtccccgaaaatgacggatgtgcgcgcgccgttgatgttttgaataatcgatttcacttcgggcagacgattctgaatggctttgacgatctcgtctttattcggaagtgtctctttcgccgtgacaagcacgacctgcacttcgcctgtttcaaaaccgactctcgtcacgatggtgcggacatcgccttttttggtccgttcgttataaacagatacgttgtgtttttccaatatgcggcggacaatacccgttgttttgttcgtcgccggatgctggacaatgcattccttaatcggaacaattttatgggaatcaagtccgtataagccggcaatgatgctgccgctttgcgagcgtccgacttgaaactggcttttgttccggtaattccacgggttgtccattccgatcgtttctttaatgttcatttcttcaacattgaatctcgtatgacgttccaaagactgaatgacgatatcgcgcttttcgcgaagctgctgactgtaggccagatgctgaagctggcagccgccgcattgatcgtataccggacaaggcggcgtgacgcggtgttcagacggcttgcggatttttttgacgcgtgcttctgaaaatttcggctgaacgtttgtcgcttcggcaacgacttcttcgccgggcagagcgccgggaacgaagacaacctttttcttaaaatagccgacgccctctccattaatgccgaggcgtttgatggtcagcggaaatgtctgtccgattttcaattcggcaggcgcctttttttgatgttgattcacgttttattctctccgtttctataataaagccatcctcatgggaaaacggctgatttgaaatatcacatcttttcagtataacatgcagccggcggttccttcatgtttttcaccggaagtttccaaaaaatactcggaagcgatcaaatgccatcggtaagccatcttgtttttattcaatacttctccacaaatacaaggacgcgtagcttaaatacggcgcccattccctgcttacttgaagcatcaagtcttttgacggtttatcctcaagggcgaagcggcgtttgacggcgttttgcaggccgatatctgccaaaggaaacagattcgggcggccgaggccgaacatgaggacgttttggacggtccatggcccgatgcctctgatggtgatcagctttttcataatgtcttcatccgataactggggaagttccgcaagattgagcgctccgtctgcaatcatccgtgaaaggtcaatcgcatattccgcttttctcatgctgaactgaagctcccgcaagtcctgatactcaagcgccgcaatcgttttcggctcggggtagcaccagacgccgtctttttgttcgccgaaggcatggacgaaccgttccgttaaggtaaaagcgaaggacaggttgagctgctggtggatgatgcatttcatgagacagttgtacacatcgtattccagcacgagcggggttcccgcatgctcttcaaaaagcgcagacagatttgtttttgaaaaatgatcaagcacaggctgaagcggctgctcccactgaaaaatgtgtttgatccgttcaatcatctcctcgcggtccgtttcgccgctgacgaggaaaaccggatctatggcggtgcctttcgcttgaaccgtgatgaccgacagtttgccgtcccgtgttctgagcggaactttaattgaccttgctgtaagatcgaccgcattcagcggatcgagtgacagcctttcaagcactttatcaaaatgatacggcggcgtgaccgaaaccgtttcctcccacatatgctccacccctttttgtccaagtatatcacgaagcgttccgacggcaattcgtatacttttcttcataacgccgcatgatataatggcaggcggagggttgtttatgatacatataaccgcaatcacaacacataatgagatattagataatatccccctatcacgtacagaacaaccggacatcgcatggtactggattgattttttcggagccgagatgcatgaaaccgagctgctgcgggattatttccattttcatccgctcgcgattgaggattgctttcagcacatgcagcggccgaaaatcgaccattatgacggctaccgtttttatgtgctccacgccttgaacccggacacactggaaatggaagaggtggacatttttcagtccgaccgtttcatcgtcagcttccatctgcacgaatcgcccggcatctcgagagtaagagaacggtttttcgcttctccggggttagccaaaaaagggcccggacacataacgtatatgattatggatcagcttgtcgatgaatatttccctgtgctgtacaaaattgaagaccggctgaatgaaattgaagacagcagaacacataaatcttacggcactttaatgaatgaagtgtttgaattgcggactgatcttttgaacctgaggcggacgatcattccgatgcgcgatttaatgtaccggattttgagtcttgaccatgtaaaagaaagccgtgaaacaaaagcatatttcagcgatatttacgaccacctgttaaaactggctgagctgatcgagtcaaaccgtgatatgacgtcagatctgcgggacagctatgtaacactgaattcaaaccggatgaacgccatcatgatgacgttaaccatcgtctcgaccatttttattccgctcacgtttatcgcgggagtttacggcatgaatttcgataacatgcctgagcttcattggaaatacgggtattttatcgttttgggtgtaatggccgctcttgtggccgccatgctgttttggttcgcccgcaaaggctggtttaatattttcaagtaagaacggctgccggctgttcttttttttgtgaaaacatgatatgttggaaaaaaacgtaaagaggtgtgcgccgttaccattctttctcacaaaaccatttcttccgcccttctgcttctcagtgtcatgtccattgccccgctgtataacggctgtacgatgtctgattacatctttgagtggctcggcttttcttcttggtctgaagatggagcccatatctccgtcattcccggggtcgtgctatattttgcggcgttaatctggtgtgccgcctcgttcagacggacgcttcccgctgtggggctgtttctgatctttctcagcatgggggtctcttccagcatcagtcctgtcactgaatatgccgctttttccttaaaacagttcgcgcctgaaagaaaagctgtcgaatatctgaagcaccgcagtgaatgcagtcatctgattgagcgcaaaaaagcgagaatgagctgcacgatttatatcaattattatggaaaaggggaacaaaccatatctatcacacctgacctatctgagaacgtaaagggcgtcacattcaaatcaaaaacattcactgtaaagccccgatcgaaaacaatcatcaaggcgcagtttaccggcttttataaagggaaagccgcatcagacagcggatggtcttcagaacctgacctaaaagttgcaagcctgcacacagcagaataaacgttttgcatgtataatgatggaaaacatttcattggagggactgcaaatgaaaatcgccatcgtcggactcggcaatatgggccgccccatcgccgaaaatatcatgaaagccggatacagtctgactgtctataaccggacgaaagaaaaagcggctgatctgctggagaaaggggccgaatatgccaaaacgccccgtcaggcagctgaacatgcggacattgtgctgtcaatgctgtcagacgatgaagccgtaacaggtgtgactttcgggcctgacggcattattgccgggttatctgaaaaaggcattcatatttcaatgagcaccatcagcacggcgctgtcagaacagctttccgctgcgcattcgagcagaggacagtcctttattgccgctcccgtcctcggccgtcccgatgcggctgagaaggccgagctccgcatcatcacagccggccctcaggaagcgaagaaaaaggccgaaccgctgtttaaaagcctgggtcagcaagtatttgacaccggtgaagagaccaaaacagccaacgcggccaaaatcagcatcaatttcttgctcgtttctatgctggaggcgttatctgaatcattcttaatgatggagaagtacggcttgggccaaaaacaatttttagaaatcgccaacgcgctctttggctctcccgtctatcaaaattacggaaccatcatgtccgagcagaaattcgaaccggccggtttcaaaatgtctttaggcctgaaggataccaatctggcgcttgccgccgcagaacaggttgccgcaaagctccctcttgccgagctggccaagagccattttgaaagcgggatcgaacaaggcttcgggggtctggattgggccgctttgattaaatgcctgaaataacaaaacacctctccaatagcaggagaggtgttttttacaagcgcggcagcttcatttctttctcaaacataaggtcatcaatgcttttaaacgtgtatccttctttttttaaatcggtaatcgcatcgtccaaagcttctgaattgtcctttgaaacggtgtggagaaggtagatcgcgccgggatgcgcctgcttgatcatgtgatcgtaggcgtattttttccctttctgctccttaaccttccaatcgacaaatgcgacggaccagaaaacggtttgatatccgaggcgcttcgtttctttcaagacatattcgctgaatacgccgcgcggcggacggagatacaggttatcccgctttccggtgatgttgtaaacagcttccgtgacggaatcgagttcgtcctgaatctgatcacccgtttttgtcgtcagatcaggatggtgaaaagaatgattgccgataatatggccttcctttgacatccgcttaatcaaatcaggctgctcttttacaaaatggcctgtgacaaaaaaagtgcccgtgacatgatgtttctttaacacatcaagcaccttcggggtgtatccattttcatatccgttatcaaacgttaaataaatggtcttttctttcgtattgcctaaataaaaggcatcatattttttgaccagattgtccagctgcttgccggcatccggcggctgatgattgacgcttcgtttaaatccccagtttatccgctcattcggcacggcctctgcgctgtttatgcctcccgcaagtaaaacggccatgcagcaaattgaacaaaaccatttcatgcccagcactccttctgcatttttccttattttgcagtaggctctccccttttatacagccgcattatggaaagagaaaaaccccggcagatgccggggtttattcccaatcctttttaaaccgttcgtattttgcttccagatcatcaagcatgccgatgagccggtctatatcttcaacgtccgttgattcagggtctaacgaatcaatgacattcataaacatatcgagtctgttcttcaagtaatcgagctgctgatctttgctgtttactgcattccccatacttccactccattcattttttataatggtagcgtattttttgccgtttttcaatggttccgctacttgcgatcttggcagatcaggtctaaaattaacagttggcagacgttagtatgcccatttataaaggagttagatagtcatgacacaaaacacagcactgcgtccgatcacaccggagtacgatccttgggaagcgtacatggatgtggaccagtatggagatatgaaactgacgaacgttgaattcacaacgacgaccttgtgcaatatgagatgcgagcattgcgccgtgggatacacgcttcagccgaaagacccgaatgcgctgccgctcgaccttttattaaagcggctcgaagaaattcctctgttacgctccatcagcattacgggcggcgaaccgatgctttctctgaaatcggtaaaggaatatgtcgtcccgcttttgaaatatgcgcatgaacgcggtgtgcgcacacagatcaattcaaacctgacgcttgatatcgggcgctatgaacggattattccttatttggacgtccttcacatttcccacaactggggaacggtcgaggactttgccgacatcggatttgcgatgatggagaagaaaccgacatttgaacagcgggcgcgctattttgacaaaatgattgaaaacagccgcacgctggtggaggcaggcgtcatggtttcggcggagacgatgctgaacaagcgcacgctgccgcatatcgaacatattcaccggcagattacggaagaaatgaaatgtcagcggcacgaagtccatccgatgtatccgagtgatttcgccagcgcgctggaatcactgagcctgaaagacatgagacaggccattcatcatctgctcgatattcgtgatgaagagacatggatgctgttcggcacgctgccgttttacgcatgcagccctgatgaagaagaccagaagctgctccgccgcctgcgggaagcgaaaaacgttacggtgcgaaacgaccctgacggccgctcacgcctgaatgtcaacatttttgacggaaatatcattgtcacggatttcggcgatacaccgccgctcggcaatattaaaacagacagccttcctgaagcgtatgacaggtggagacagacgaagctgagcaaagagctgaactgccgctgctcaaacgtccggtgcctcggcccgaacgttcttgtcaaaaacagttattatcaggagacagatttttcattacgcaaagccagaggttaacagaagatggaaacgacaattacagatattttgaaaagcaaagtggttgagatcatcatcgtcgctctcgtgctttacgtcggtgtttttctgatcaaccgctttgtacagatgttatttaaacgcactgatttcttggaggaacggaaaggaaagacaatcgaaagcctcgtccggtccatcacccagtatacggcgacgatcggttttatcttttacgttatttcattatttgttcatgatttcggccgaattttagccggggcgggcgttgccggtatcgtcatcggtttcggagcccagtctttaatcaaggacattttggccggtgtatttttaatatacgaacgccagctgcataaaggcgattacgtgacgattaataatctgttcaacggcacagtcgaagaaatcggactccgttctttgcagatccgtgagttctccggcaagctgcttaccatttcaaatggtgaggtcagacagcttcagaactataacattgattttatgcggattaccgaatctgtcgtgatcagctataaggaagaccctgaacgggtatatgccatcttagaaaaagcctgtgacatgctcaatgatgaacttcgcgattcactgaaacgggatgaatttctcaatgcaacggagccgtttcaagtgcatggaatcatgagcctgaacaaattgacgagaggcattgaatttacggttaaaggcatggttcaagacacagaatacttctcggcaagccttgcggtgaggcgcgttcttgcccgcgagctgtacaacaacaatgtgcaattgcttgaggagatgtatcacacacaaaaaagctgattcccaaaccggaatcagctttttcatttatctcggctgcgctgtaatttgaaagccgaatgtgacatgatcctgcaccggaatccaagcgccgattccttgcgaggtcacatttttgacgacaagtttccgcttgctgcctttcagcaccaaatacacttcgccgtatgttacttttcctttttcattaacggccggggcataggcgtgtaaatagccgagccgctgcggagaaattttataagtttgatcgcgttttgtgcctgcgccgatgactgtttcaaatgcaagcggcagttttgttttcttcatcgctttttgcatcatcatgcttttcacatcttctgcgttcggcacttttgctgtgagcccgcctttgattttgtattgctgttcttgtgcgtatgaaatttccgcggcttgctgcccgccccggttatccgctctgtttgtgttgatttttttatattcccagttggcgaccgtttcgttcgactgatagccgagcgcccatttcccgagaaatattttcgcccggtatccgatggcgagcggcgaaccggaaaccgtggtttcattcagcattttaatcagatgcgggttttcgatgttgatctctgatgtatctaacaattcctttgccagtttgctcggctgaagcatcggctggtcctgtgaagcattcggatacgtattttcctttgaaatgcttacgacagagttgggaaccttaaacggtttctttgcaccggcagacggcgttgcgaaaaaactaaaagataacagcagaatcagtgtggcatgaaacagctttctcatcatatcactctttctatagcattttcctttagtcttttcctccgcaatcgttgttatccgcatttttttacaggttaaagcaggaaaaatccgatcgccataatgacataggccgcaaggagcgtagccccttcaaaccagttcgaatcaccgtcatttgaaatcatcgtcatcaaaaggacggatgatatcattgcgacaagctcaggcaatgtgaatacaagcggcatattgaccgggaaaaagacggaacagatgacaagcaccggggccacaaacatggcgatctgcaaagtcgatccgaccgcgatttcaacggcgacatccattttgtctttgtacgccataatgatggcggacgcatgttctgcggcatttccgacgattgcgacgataatcactccgataaacagctcgctccagccgaactgttcagccaccgcatgaaacgtatggacgagattttcagatatgtaggcgacgataatggtggcgataaataagacggcagtcgctctcttcccagaccactcaggctgctcctcttcttccttggcctccggctggttcggctgataaacaccgcggtgagtgacgagcttgaaataaagagccgccacgtacaaaaggatcatgatgatgctgatgccgacacttaaatcaagcttgcttttttcccccatatccatggaaaacacttcgggaatgacaaaagctacgataatggcaaatatcagcaggcctgaattatgccgggcatcatgaatattgaattcctgccgcttgtatttcaaaccgccgataaaaaacgacaaccccgcgacgagcagaagattgccgagcaccgaaccggtcagtgaagcaagcacgatgcccgtcagcccttcctttaaggcaaaaagcgatataatcagctctaccgcatttccgaacgtggcgttcagcaggccgccgatccgcggacccgcgataatggcaagagattcagtcgctctccccatataacttgcaagcgcaataatcgtcaaacaataaataataaacaaaacagctgacggccagtgtatcaggcttccgataactgaaagcggcacccccgccgcagccgtaaagaaaaaaatccgattcatactcagcctggctcctttttcgaatgagtcttttttatccttctcaaaaactccctcaattacacttccgtagaaacccaaattggcattttcaggttgccggacgcgaaaaatccgtgtacgatcaagacagatactgaagaaggagaaaatacgcgatgtcacgactgcacttctttattttggttctgcttgtttccatctccggtttttcccaaggcatgcttttgccggtgatttccgtcatttttgaaacgaacggagaatcagccgccataaacggccttcacgcaaccggcctgtatatcggcgtgcttctcgcgtcgccgtttatggaagcgccgctgagaaagctcggatacaaaccactgatggtaacgggcggatttcttgtcatcatcagcttattcagttttatttggcttcaatccatatggatatggttttttcttcggctgcttatcggaatcggcgaccatatgcttcatttttcaacccaaacgtgggtgacttcaaagtcaacgcctcaaaacagaggaagaaacatttcgctgtacgggctgtccttcgggcttggattcgctgtcggtccgttcatggttcctcttgtgaaaacaagtccgtcccttccgtttattgtatccggctgtatcagtcttgccgcctggctgtttgtgtttttcttacgtaatgagcacccgccgcaaggtccggatgaaacagccggggacaacagcgcaaaacgtttctaccgcgccattcttttcggctgggtcgcttttcttccggctttcggctatggctttttagaaacggcgctgaacggaagcttccccgtgtacgccctgcgcttaggcatatccgttgatgccgtcgcgctgatattgcccgctttcgccatcggaagtattgtattccagtttccgcttggtttattaagcgatcggttcggtagaaaacgtgtcctgctcgtcattttactgacgggcgccctgtgtttttcgacggccggattgtttccgtcgcctgccgttatcggcggctgctttttcatggcggggatggcggtcggcagtatgttttccctcggtatcagctatatgagcgacctgctgccgtcccatctgcttccggcgggcaatctgctctgcggcatttccttcagcctcggcagcatgatcgggccggtggcgggcggctggtatatgcagcggtttgaaagcgccaatttgttttattttattacggtgatcctcatctgtatttggcttgcgctcgtcttcggaaaaacaaagcacagccctgcatctgaatcccattctttcccggtctcataaaaaaagccgcctgttccatgccaggcggcttctttctagtggtatccgttctgcccgttcgcgcttccgcttgttttattcttcgggccgttttttgagttttgtttattatggcttccgccttttttcgtatgcttggtcataatcggtttccctccgttttcagcttgaacgtcatccgttcctctatagcttgctcccgcggtagggattttcatcaggaagctttttacgtttatgtaaaagcgcgttgatttctcctcctaaaatcagcagggttcccgtcaggtaaaaccagatcataaggacgataattcccccgatgctcccgtatgtggcgctgtagttggcaaaagtgccgacgtaaaatgagaacagcatactgacgataatccagccggctgccgcaaacacggctcccggcagcacaaagcggagagaaagccttttattcggcgcgaaaatgtaaagcgcggtaaacacgattaaaaggattagcggactgataccccagcggacaaccgaccacacctgcaaaaacaggccgggggcgccgataaaatctgcggccagcagcccgatttctctgccgaacaccggcagaagcagtgcgattaaaatcgtaaccaccatcgcgatggttaaaaaaattgaggtcaggcgaatgatgataaatgagcggttttcttcgacttcgtaggcatggttaaatgctctgacaatcgcattcataccgttggaagccgaccagatgacggcgataatcccgaatgacaaaagcccgccgctgcgtttgttcagcgtttgctccgtaatggatttcaccatggacatggcgctgtcgggcgcatattgatcgactgcgccgagcacgtcttctgccgatatgggaagataggcggtgagcgtcagtatgaaaatgattaacggaaacaatgacagcagaaaaaaatacgccagctccgccgatttactttgtccttcatgcagagaaaaccttgcaaacagctccttcataaaactcatgacatcccacctcaatgatcgtttttcgaaaaatgctccttcgtttcttttaacagctcaatgacctgcggtgttgtctgcttcagcttggagatctgattgtttaaaaaactcagatcgtctgatacggtattggccatgattttcacttgatccatttttgcagaagcctcctgtttcagggcttcaggatttttccggtaaaatgcagcacgctgcctgcacgcgtccatattccggaaacatgcctctcttgtcggcttatgtaataatgacagtgctccgccggcggcagcgccgatcagaattgcttttgccatgaagcgtgtctgtttcatcggtcaatcccccttataaatgatggtctttcttaattgtgtccagcaaatgatggcaccccgactcgatcaacgcgtacacctcgctgaaattcccggtatagtacggatcgggcacgtccgcaagatccgactccggtacataatcaagcagccttgcgatacgcggcgccgcttttttataaccggccatgctgcgcagatgtccgatattttcagcatccattgcaatgacgtaatcgaaatcggtcagatcagactcacggacctgccttgccgtgatgccgcttgtgctgattcctttctcctttagaatctcctctgtcccttcatgcggcggatttcccgcatgccaggcgccgattcccgctgaatcaatgttaatctgattttccagcccgtttttctttaccatatcagaaaataccgcctctgccataggcgaccggaaaatatttcccagacagacaaacagaacatgtaccatatcgtaacctccctattctttccccatattttgaggatcaaaaaccttatcatcatcttagcaacttttctgcggctgtggaaatatgcttttattctaaatgaattctgttagaataaaggatacgaaaacggtcatgaaaggatgcatgaatttgccgagccaacaaacagaaacgttaaacaagatgattgaagacatttcgcagaagctcaatatgctcaatgtcggcgtcatcaaagcggaagatttcagtgatgaaaaaatagaagatcttacatatcttcatcaaatggtcatgaaaaaggaatcattcagcccgagtgaaatgcaggccattgcccaggagctcgcctctctcagaaaataaacccatgtcagacctgccgaaaacggcgggtctttttgaattaaaaaagtgaaaaataaaagttcatcggtttgacacatataaaaagaaggagtatagtaactgtgaacttggtagaacgatatactaaatgagcgggccgcttatatttttttatttagtagaacgatatacttgattggtatcagcgttacgcgagtatatccgtttgtctctgcagccgttttatcaaaccagttttcagagaaaggcagtggttcaataaaggggaatggttctaggcttttatcagtttaaaaaataaattaattctttattaaccgcattaggggatgtcatcatgaaaaacatatacaccaaaatggcagcgggtctttatatcaactatttcctgctgggcatgatcaatattattatcgcatccaatatggaggcattatcaaaacagcttcatacatcagcagccggagtcagctatttggtctccgccatcggaatcgggaagctgatttcgcttctgtttgccggaaagctctcggatacattcgggagacggccgtttatcgtggcgggcgcatttctgtatctgattttcttaatcggaattccgctttcgacaagctatacggccgcgtttatcttcgccattttcgcagggatcgcaaattcctttttggattccgggacatatcctgctcttattgaaggatttccgaaaaacgcaagctctgcaaccgtgttaatcaaagcgtttgtatccatcggcgcgacggtgctgccgttttttatcgcatttattgcggacaggcatttgttttacggctggacttttttcgtgccgggcatcattttcttcctgaacggctttttcctgctgaaggtgccgtttccgaatcataagcaaaaagacgacggcggcctgacggaagcctttccgccggatgacacgttcaaatcacagccgtcgatatggcgcgaaggacttgccattattttgttaggcttttcatctacggcgctgtttatgctcgttcaagtatggcttcctaagttcggacaatccgttttgggcatgccggaggtgcaagccgttaagttgcttagctattacagcatcggggcgcttgtgtctgtgttattgttggccgtgctgttaaacagagtgattcagccgattacggtaatggtgctgtacccggtgatcgcggcaatcgcgctgcttgctttgattttcattcatcagccggccgtatcggtcatcagctcctttgtcatcggtctttcaactgcgggtattctgcaattggcgatgacggttatggctgttttattccctaaaaataaaggtaccatcacatcttttgttaatatagcatcaagcttatcttttattgtcattccgcttgtaacgggagcgatatccaaagcggccggcctgacccctgtttttctgctagatatcggaattgcggctgtcagcgcacttctcgcattgtttatcggaatccgctttaagcaagtgatgaaagcctgactattttttaagggagaggatttatcatgcatactattacaatcaaaaacacggttatcggcgaaggccttccgaagatcattgtgccgctgatggcagccggagagaaagagcttcttgaagaaatggaagccgttaataagcttcacccggatatcattgagtggcgggcggatgtttacgagcatgttgacagcctggacgccgtaaaagacatgcttgaaaaattgcggaaagccgcaggcgaaacaccgctgcttttcaccttcagaagccataaagaaggcggaaataaagtcattgacggccgcttttacattgaattgctcaaaaccgcaatcgaaacaaaacacattgaccttatagacgttgaattgtttacaggcgatgccgaggtcaaatcaattgtaaaaaccgctgaagaaaacggcgtatatgtcatcatgtccaatcatgattttcatcagacaccgaaaaaagaggaaatcatttcccggctgcgcaaaatgcaggcgtatggcgcgcatattccgaaaatcgcggtgatgccgcaaagcactgaagatgttttcgtcttattggatgccacacacacgatgaaaacacaattcgcagaccggccgatcatcacgatgtccatggcaggcacgggcctgatcagccgcctggccggcgaagtcttcggctcggcatgcacgttcggcgcgggcaaagaagcatcagcgcccggacagattcccgttgatgaattgcgcagtgtactcagcattttaaataaaaatatgtaatcagcgtttttcttcccccgagcgggatgaaaaacagatgaatggactaacggaggaatacatcatgaagaaagatttaggacggattaacggaaaaactcagcttatcggattattcgcgacaccgatcggacattctttatctccggcgatgcacaacctggcgtttaaaaaattagggctgaactacgcttacctcgcgtttgaagtcggcaatgaacagcttgaagacgtggtaacgggaatgcgcgccttaaacgtcagaggcttcaatgtttcgatgccgaacaagatgaaaattctcccttacctcgatgaactcgcggattcagcgaaattcaccggtgcagttaatacagtggttaatgaaaacggcacattgatcggacactccactgacggtatgggatacgtccgcaacttaaaagaacacggcatcgatatcacaggcaaaaaaatgacgcttgtcggttccggcggggctgccactccgattgcgattcaatccgcattggaaggtctcggcgaaatctcaattttcgcccgcaatgacgcgtttttcgaaaaagcggaagaaaatgtccgcatcatcaatgaagaaatgaaaggctcttcttgtaaagcgaatatcttcccgctagaagatcaagatgcgctgcgtgctgaaatcgccacaagcgatattttcacaaacggaacgggtgtcggcatgaaaccgcttgaaggcttgagcgtcattgaagacacatccatgctccgtccggatttgattgtgacagacgtcgtttacaaccccgttacgtcgaaattgctcgaacaggcacaagaggccggctgcaaaaccattaacggcctcggcatgatgctttggcagggcgccatggcgtttgaatactggacaggccgtgaaatgccggttcagtatattaaagagcaaatgtttgaataacctattgtaacaaaagcgccgaaggacaatccgtcttccggcgctttatcattttctccccctctccctttcttctcatgcgccaaaacgcttataatggttgtaacaataaaaaccaagtgaggaatgcacgtatgaaacagcaaaaaaaacgccgggtgacattgcagcaggtcgctgagcatgccggcgtctcaacatcgaccgcctcattaatcgtccgcaataatccgcgaatttccgaagcgacccgtgaaaaagtgctgcaatccatgcgggaactggggtacgtgtatgatcgggtcgccgcgaatttacgatcacagacgtctacaacggtaggactgattattactgacatttccaatacgtttttctcagaatttctgatcggcgttcagaatacgctcgaggaagtcggattaacggtgctgttaggcacgacatttgattctgtcgcgaagcaggagcagctgatctcgactatgctggaacacagggtcggcggattgattttatgtccggtttcaggcgcggccgaggaaaccctttcccgccttgaacagcttgacattccggtcgtgctcgccgtcagggaaatcgccgatgccgactgtgattttgtcggagccgattatgaagaaggcacctataaggcagtgcatcatctcattgaaaaaggccatcaggagattgcgtttctgggcggcgtgaagcactcatctacatggacaaaacggatgaaaggtttaaaaaaagcgctccgtgaggccgatcttgaagtgaaaaatgaatttgtcattgacagtgcaccgacccgcgaggcaggctatgaagcagtgatggagctgctccgccggcctgagcgcccgaccgcgattttctgcttcagtgatttggtcgcgttcggtgtcatgcaagggatcagaaaagccgggctcatcccgggcgaagatattgatattgtcggttttgataacgtgccggaagctgaaatttcttatcccccgctcacaaccgtttcttcctttccgcggcagtcgggaaaagaagcggctcaattgctgcatgataaaatcgccagttcccagcacaaaaaacagcgcattattctggcgcctgagctggtcattcgggaatcttcatcaaaaaagcggaacgcctgatacggcgctccgcttttatattacgcaagcagttttaatgattcgcggttgaatgccggaatgtcatccggagtgcggcttgtgaccagctggttctggcagacgacgacttcttcatccactacatttgcgcctgcgttttccatgtcaatacggatcgatgtaaaccctgtcgctttgcgcccgtccaatgctttcgcgttgatgagaagctgagggccgtggcaaatggcgaaaacaggttttttatcatccataaacgctttggcaaattggacgaaacggtcatccgctcgcagcatgtcaggtgagaatccgcccgggatcagcaatgcatcaaagtctttcggattcacatcatcgatggacgcatccactttcacttccgcttccccttgtttgccttttactgtttttcctttttcctgttcaatcactgttaattcatgacctgcatctttaaaagctttcgcaggttcagtatactcgacatcctcgaaataatccgttaatacaactgcaatttttttacccatagttactacctcctgctttgatgaagtctacataaatccatgaccccagccagactaatatcaaacatgggagacacgtttgccgcccatccgtattacataggtcattatcctcatttttcatctttttacaagaatcatcatgaaatctatataaactttcacaaaatattcttacaatggtactgcatgacaaaatttgttgaaaggtggagaacaggtgagaatacagaaaagacgatgcagcgtcaatatgacactccgtattctgctgcccctagttatgatacttagtctaatcctcccaacatcacccattaaagcagaagaaaacaaatcctccagtgtgaatctcagcattttagcgacaactgacgttcacgctaacatgatggattacgattactacagcgacaaaccgacaacggaattcgggctggcccgaacggctcagcttattgagaagcacaggcgcgaaaacccgaatacgctgcttgtcgataacggagacctgatccaggggaatcctctcggtgaatacgcagtaaaatatgagaaaaatgatattatctcaggtgcaaagacccatccgatcattcaagtaatgaatagtctgcactatgattcaggaacgctgggcaatcatgaatttaattacgggcttgaatttctggacgggacgatcaaaggcgccgaatatccgatcgtcaacgccaatgtaaaaacattaagcggcgaaaaccgctatacgccttatgtcataaaagagaaaaccgttacagatgaaaacggcggaaagcatcagataaaagtcggctacatcggctttgttcctccccaaatcatgacgtgggataagaaaaatcttgagggccgcattcaggtcgaagacattgtggaatccgcaaagaaaaccattccgaagatgaaagctgaaggagccgatattgtcatcgccctcgcccacagcggcatcgaaaagaaagcgcagtcttccggcgcggaaaatgccgtttttgatctggcaacaaaagtcagcggaattgacgccatcgtatccgggcatcagcacgggctgttccctgatgccgaatacaaaggcgctgatcaattcgacgtcgataaaggcacgattaacggcatccccgttgtcatgtccagcagctggggcaaatatgctggcgtcatcgacctccggctccagaaaacagacggcgcgtggcatgtggaagatgcaaaaggcagcatcgagccgattgccggaaatgtgacttcggaaaacgaaaccgtcgtcaataccgtcaaaaaagcgcatgaaggcacgctcaaatatatcagagaacctgtcggccagacaaaagccgatatcaacagtttcttcgcccaagtcaaagatgatccgtccattcaaatcgtaacggatgcgcaaaaatggtacgccgaaaataagatgaaggatacgaaatataaagatctgcctatcctctctgcgggcgctccgtttaaagccggggggcggaacggttcaaactactatacaaacatttccgcaggtgacctcgccatcaaaaatatcggcgatttatacttgtatgacaacacggttcagatcgtcaagctgaacggaagcgaagtgaaagactggctcgaaatgtccgcggggcagtttaatcagatcgaccaggcaaaaggcggcagccaagccctcataaatgacgcctaccgctcatacaatttcgatgtcattgacggcgtcacctatcaggtcgatgtcacaaaaccggcgaaatacaatgaaaacggaacagtcattcatcccgacgcaagccggatcgtcaacctttcttatcaagggaagcccgtcagcgccaagcaggaatttcttatcgtcacaaataattaccgcgcttcaggaggcggagggttccctcacttaagcaatgataaaatcgtatattcatcagccgatgaaaacagacaggtcttaatggactacatcatccagcagaaaacgattaatccgcaggctgatcataactggtccatccttccggtcaaagggacgaacctgacatttgaatcctccttggccgcaaagccgtttgccgaccgtgcagatgacgttgcctatatcggagaatccaaaaacgctggctacggacagtacaagctccagttcaaggatgatgaaccgggcacagatccgccgaaagatgatccgtggaagctcaccgttatgcatacaaacgacacgcacgcccaccttgataacgcggcgaggcggatgacgaaaattaaagaaatcagaagcgaaaccgacagcagcattttgcttgatgcgggagacgtcttctcaggcgatctctatttcacaaagtggcagggactggcggatttaaaattgatgaacagcatgggctacgacgcaatgaccttcggaaaccatgagtttgataaaggaccgggtgctctcgccagcttcctgagcggtaacggaagcgcggttgatccgtccggaaaatatcatttccaagcgcctgattttccgctcgtcagcgcgaacgttgatgtgtccaaagaatcaaagctcagtccattcatcaaaaaagcagacacgtttacggcaggaaaaaagaaaaaagcaggcatctatccatacattctgcttaatgtaaacggagaaaaagtcgccgtattcggcttaacgacagaagatacgtccgtcacatcaagcccgggaaaaagcatagtctttaacgatgccttccaatcggcgcaagatacggtaaaagagatacagaacaaagaacacgtcaataaaattatcgctctgacccatatcgggcatcagcgcgatctcgatctcgccaaaaaagtaaaaggcatcgacttaatcgtcggcggacatacgcatacgcttgtagataaaatggagatagtcaaaaacgaagagccgaccatcgtcgcacaagcaaaagaatacggtgaatacctaggccgggttgatgtcgcatttgacaaaaacggcgtcgtcctgccgaaacaatcctctcttcaggcgctgcctgtgaacgagcagacgaaagaagacccggatctgaaagaagagcttgatccgtttaaaaaagagctcatctcagtcaaaaatgaaaaagtcggctcaacgaaggtcgcacttgacggccagcgtgagcatgtccgctccaaagaaacgaatctcgggaacttcatcgcagacggcatgcttcaaaaagcgaaggaagcggccggcgcccaacttgcgattacaaacgggggcggcatccgcgcaggcattgataaaggagacatcacactcggtgatgtactgaatgtgatgccgttcggcaacacgctttacgtcgcggatttaaccggaaaacagatcaaacaagccctggaacaagggttaagcggaattgaggctcaaggcggcgccttccctcaagttgccggcttgacatacacgtttacactgaataaaaaaccgggacaccgcgttcttcaagccgcggccgtgcaggatgacggcagcttaaagccgatttctgatatggaaacatacagagtcgccacaagtaactttgtcggtgaaggcggagacggatattccgtctttaacgaagcatcacataaagaagaccttggctttgtcgactatgaggtcttcatagaacagcttgaaaaagcaggaaaagcggttgaaccgaaagttgacggccgcgcacaagaagtgtacctgccgacgaaacaaaaaaacggctcatggacccttgaagatgacagcgcatttgccgtctatgccaaaaacgccaacactccgatcgtgtattacgacaagaatgacggcgccaaaaagcagattgacctcagtgtgaccaaaaaacagatcggactgttaaaggacagaacaactgattcttcccttacgatcctgcatgacaagttcagcatgaaaatgccgatggcaaacgcagccgcagctgatacaaggttcggcgtatcgccgaaaggaaaagtaagcgggtcgctttcaaatgtgtacgattttacaatgaagcagaacaacaaagaagtaaaaacattcaaagcgccggtaaagctcaccctgcgcattgagaatacgaaaaaagcgaaacagccgggcatttatcatgtagaccggaaaaagcacgtctatacaaaaacagaaaacggttcggtttcacacgatctcgtcacgggctatacaaatcatttcagtgaatacaccatattaaacgcaaacacgaagagcgcgccgccggcaagcggagatcacggctcgggaaagcagccaaacggacaaaacccatcatccggccctgcgcaggacggagtatcgccgggcggcctgcttcctgatacggccacaactatgtataccattctccttgcagggtttctcatcagcgcgctcggaacggcactgtatctgtatcaaagaagaaaagcaaaaaaagtgaacgaagcataaaaaaaccgcttttatcgggcggttcggcacaagagctcccctgatctgatatcaggggagcttttctgtcggtccctttctgagtcgacagccgtatgtccgaatgataaaatatcgcacagacgtacaatctatggtatgacacttcatggcgggtctggctttcccggcgccgcctgtttggaggacttttattgaagataacaggaaagatacgaaacagcatgacttacaaaaaaaagctgttttacgcaataacagcactttgttttatcggctcgctcattttcgtcaattacaacgcttctttttatgagcgcccgattgccaaagtgacgaaaacaacattggagcatcaatctgacgtgcaggacatgcataaaaacaaagataggattttcaatcagaggatcacagccaaacttgaaaacggcagtcggaaaggacagctcattcatttgtccaatcaatattcatcctccggagcgaatgatcagaaatattcaatcggcgatgaagtattcgtttctattgataaaggaaacacgtcaaataaggatatatcgggaagcattatagataaaaaacgggataaacagcttttgctgatcgcttggattttcatattcaccttgcttatcgtcggtaaaaaacaaggcttcttttcgatcatcagcctgatctttaacgctgttttgctgtcgtttgcattagatttgtaccggaagcaccagaacatcgggctcattttcatctgcggtatctgtattctcatctttactgtcatatcattgctgcttgtcagcggctttcacgcgaaaacatatgcggccatagccgcgacgctcgcaggcacatttgtttccctgctgattacgtatcttgtgatgacggctgccggagagaaagggctcagatatgaagaaatgcagtatttaacccgcccttatcacacggtgtttatggctggggtattcatcggatcactgggagcggtcatggatgtggccattaccatgacgtcatctgtctttgggttatatgaagaaaacaagagtatctcattacaagcgcttaaacggtccgggatggagatcggaaaagacataatgggggcgatgaccaacattctgttttttgcttatataagcggctctattccgatgatgcttttgtatctgaaaaatgattcaccgataggattcactctttctatgaacatttccttggaaatagccagagcattggccggggggatcggaattgttttaaccatacctgccagtctgtatgcttctatctttttcattaaacgaaagaaggcaagctcatgaatgtcatcgtaattcttgcggcgattttatttctattgatggtcatgatcggcggtaaaaagggagcgagatcatttattgcgttatttttaaatttcggtgttctctttctcaccatcattttaatgacagacccgcatatcaatccgattgttttaacattgctctcttccgccgtgatttgcagcattacacttttttatattaacgggggaaacgtcaaaaccgtaaccgcctttatttctgcaatgctgacgattgtattgctgctgttttttattatggccgtaacgaaacatacttcgattcaaggatttggtgaagaagaactgggtgatatcggtatattcacgctttttgtcggggtggattttgtgaaggtgaccgctgcgatgatcattatgggcacgataggggcgattaccgatgtggcgatttccattacctcgcccatgagagaaattcacagccataatccgtccatgaacagaaaagatctgtacaaattcggtttaagcatcgggagagatattttaggaacgaatacgaatactttattctttgcttttttcggcagctatctggctttaattatatggtttaaagacttatcatactctgctgaaaaaatagtgaactcaaaagtcttcagcgcagaagccgtcaccattctttgcgccggaatcgggatcggcttgatcattcccgttacgtcctggatcaccgcctattttttagcgaaacaaaataaacgttaaaagctgccggcagtttcccggcagcttttttatcttatacccacttcacaacgtcttttgagacagatcttgttttcgggcgcggttctctgacacggtacccgaatgcggccatgacggagatgtcgaaacttccgtcttcaagaagcccttcttcttcaagaatccggtgaatttctttgtaattgaagccttctaccgggcaggaatcaatgccgatctgcgcagcggctgtcatcatattgccgagggcgatatatgtctgctttgatgcccagtcaaacagcgcacgatctgattcaagcagattgaaatcatgtttctggaattcttccgttttgctgatatagccttcatacatatcatccggcatttttttgacttcccgcaagtggtttttgacatagtcggcgtcaaaacggatatcctttgccgtccgggcaagcagaagaacgaaatggcttgcggtcggcagctgcttttgcgcgccccacgtgaactcgcgaagtttttcgcgaagctccggattttggacaacgacaaatctccaaggttcaagaccgagtgagcttggggataatcttcccgtttctaaaatgaattcaaaatcgctttctgaaatttttttctcaggatcaaattcctttgtggcgtgtctgaattgatacgcttcgatgatctcgtgttttttatctgacattctgatctctcctttacaatctcgtatgtactattgtagccaacatttttaaaagtaccagtacgcacatttttgttggatagtatccattttgatactgacaaaaaaacggactgccgcggcagtccgttcttatttttctcttctcgcaaagtcgacgaaacgaaatttatcgagcctgtgccggctttccgtatattgaaagaggctggtgtcctccaaaaacacacggtttttcacgaccgccatatggctgaatccgccgagatccaaatactttcggtcttcttcccctgccggctccacgacaatttctttttgcgcgtagctgattgacagaccgagctcttcttcgagatactcgtaaatcgaatcttcgcaaatcgccttcgtcaaaagaggaacgtgctttttcacaaagtaatccttgtccaaaataatgtgttctccgtcaatccgccttgatctgacgacttcccacaccttttcatccgcctttgtgccaagctcttttgcggcttcggcgggaggcggaatcagcccgagacggtgaaccgtcgttttcgtctcttttccgagcgtttccgaaagctccttaaagctgatcaggcctgagacgggaaaacgcattttttctctgtctaatatgacggagcctttgcctttgattttctggatgtagccgttttgcgccagcatattgagcgctttgcggacggtttctcttgatgcgccgtattgatcgcacaaatcattttcagacggaagaacgtcttccgccttccgcatgccgctttcgatttgctgcaccatgtctttatagattgtgatgtatttattcactttcattcatgaccacccagattagtgtatcacgctttggtcagatgataaacgatcgattcatacggacggagcgtcaatcgttccggccgcccttccctctgttcatcattcgtcaacagcaccgtaaaccgccagccggccatgtcttcaagcgggagcgtaaaatccgcttcttttccatagaagttgttgatgcacaggagtttttcatccttgccgtgtctcacgtacgccagaaccgacggatcgtcttcagcaagcagttcaaacgttccttcggtcacgatgtcatattcctttctgagccggatgagcttctgataatggtagaaaattgaatccgggtcccgcaaagccgcttctgcgttaatgtcctgataatcatccgccgcgggaatccaaggcgttcccgtcgtgaaaccgccgttcggttcgctgttccattgaacgggagtccttgaattgtctcttgatttctcttttaaaatggcgataatgtctttttcgggcacgccctcttccttcatcttcttgtaaatgttcagtgattcgacatcacggtatgagccgatgtcatcgaatttcggattgcccatgccgatctcctcgccttgataaatgtaaggcgttccctgcatcatatgaatcgccgacgccagcattttagctgatttcgtccggtacacgccgtcgtctccgtatctggatacgacccgcggctggtcgtggttgcaccagaataaagcattccagcccccgcctttttgcatctccgtctgccaaaacgctaaaatccgtttcagcttcagaaaatcaaacggagcgagcgcccacttttcaccattcggataatccacttttaaatgatgaaagttaaaggtcatatcgagttctttactttccgggtttgtgtaccggatgcagtgatcagccgttgtcgaggacatttcaccgaccgtcatgctgtcatatttcgaaaacacttcccggttcatctcatggagaaattcatgcacacgcggcccgtccgtataataaggacgcccgtcatgtccgtccttggcatcaggaaacgattggtctttagaaatgagattgatcacatcaagccggaagccgtcgatccctttttggaaccaaaaatgcatcatgtcgtaaacccgttttctcatctcttcattttcccagttcaaatcagcctgcgacacatcaaataaatgcagatagtgctggcctgacgccggatcgagcttccaagcggagccgccgaattttgattcccagttgttcggcgcccggccgtcttcctttccgtctttccaaatgtaaaaatcccgatacggactgtcaggtgacgagaccgcttctttgaaccacctgtgctcgacggatgtatggtttacaacaagatccatgacgaccttgatccctcttttgtgcgcttcattgagaagacgttcaaaatcctccattgttccgtattcttcataaatggtgcagtaatcacgaatgtcatagccattgtcattctgcggtgaatcgtaaatcggcgtaagccaaatgacatcaatcaaaagcttctgtaaataatcaagcttctcgataatgccgttaagatcgccgatcccgtttcccgtcgtatcattaaagctcttcggataaatttgatacaccgctgcctttttccaccatggtgtgctgtctgttttcatttttcttcaccgcctgtattcgtttgatttgaaaagggaaagggacagcctgaatgaaggcgtcccgcaggttatctattttttccgcttcagccgcgcatacccgtatgttcccgcaaacgggagaatcagcacgatcagcattccgagcgcaaacggcccccagtaccggctcatgatggagaaaatccccggcacgccgccgactccgactgagcttgccaaaacgcctttaacggagatgtacatccctgcgattcccgaactgatcatggcgatcacaaacggaaatttgtaacgcagatttacgccgaaaatcgccggctcggtaatgcccaaatatgcggaaatgccggccgtcagtgaaagcccccgctgttttttatcttttgtaatcagcatcatggccaaagccgccgatccttgagcaatatttgacaaagcgagcatcggccatagaaatgtgccgccgagctttgagccgattaattgaagatcgaccgccagaaacgtatgatgcatccccgtaatcacaagcgccgaatacagccctccgtacagcaggccgccaatggcggagaattggccgaaaatagcgatcaatcccgctgtcagcgcgtttccgatcgcaaaagtgatcggtccgatgatgacaaacgacagaaaaccgatgaccagcagcgtcacaggtgcgacgactaacagctgaatgccttccggcgtccgtttggttaaaaagagctcaagcctggcaagtaaataagacgccagcagaatcggaagcacctgaccttgatacccgactttctgcacctcaaggccgaagaggttccacaccggaatatcgccgctctgctcggcagccccgtagccccatgcattcaacagatcaggatgcacaagcatcagcccgagcacgatgcccaaaagcgggcttcccccgaaccgcttcactgctgaccagccgattaaagccggcagaaaagcgaaggccgtccccgcaatcagattaatcatattggcgagatccgcccattgcggatacacttggacaatcgattttgtgctgaagaaaatgccttccgccgttaagatgttgttcagacccattaaaagcccggctgtgacgatcgccggaaggatcggaataaagatgtccgcaagcgttttcacagcgcgctgcaacggattcattttttgcgctgccgccttctttacgtcatcctttgacgcttcgcctatccctgtttccttcactaactccgcatatactttgttgaccgtcccctgcccgatcacgacttgaaattgtccgtttaccgcaaaagaacctttgacaatgtctattgcatcaagcattttctgattcactttggtttcatctattaacgcaaaccgcaaacgcgtaacacaatgagtcgccgcctcaatattttcgattccgccgacagcttcagcgatctgccgcgcagcccggttaaactcacccatgccaacccctccgtaaccgttttcattttgtcttgtaaacttgtatatacatgtttatgactctattgtaatgatgtatatacatgtcgtcaatctatttttatagcgctttcatcacaaatatactgcgaaagacccttacacaaaaaaatccccgccgggacggggtcttgattacttgtttttcccggagcatgtccaggcggaatcacaacaggagcagcaaaagcatacagtactgtacaactaagttaaagaggtgtgaagagatgccatccactgttatcaacctgtactatttgaagattaacagtatttctggcaacggatctattacgattggggaagcggcatacaacagtcccaccacaaataacaaatcacaaggactgaactcttcattcggcgatacgtcacctatagaatcgatgatggagaacttgttaaatgatcctgatgtaaacgaccagacagccatcggaaccgcagataccgcaaatattacgccggtgccgcccattatagattaaaggggtttttatgaatgccttaccaaattaacgtcgtcaatataaaagtaaacggagcaacgcaaaacggaaacgtcgatatcggtcagaccgtacaaaacagccacaccgccaacagtaaacttgtcggcgcgaacttttctttaggagacttttcgccggccgccggatgtttgaattcgggccatcttgaccctgacgtgagcgatcaggatcagatcgccaacccgtcaatgccgatcgcaaatcaaatataggggagctatgctgaagtggatatcgaaaaaatgagaaagtggcttgagattacgaatgagcacaagcccagcgacttttggaccaatgtcctgaaacggaaatctcccgaagagtttttctccttacaaaaaaacaccctgatttatgatatctatcaggatgaacagtacacatttgtcattgtggaattgcccggtgtttacgaagaagaattaacattgaggctgctgtcaagaacacggctgcatataaaaggaaacatcacgcccctttttcccaaggacatgggaatctgccaaaaccggtattacggggaaattgatgagacgattgatcttcctgaaccggctgagccccatcttttacaggcgcagtgcgtcaacggcctgcttcacatttcctatccgcgtctgatggaacacattccttttcagaaaaaaatataaggagccggcttacgggcggttcagccatctgtacactttctccttataatgagaagatgcgggttttgagaacatggctttctcctccgtcagcttgtcgagcctgacttgtttttccgtccgtttgttccgcaggtgatccagctccgtttcattgcggcacttggcgatcaagtaatcgagtgtcatcagctctttcttcagcgcgccctcatcctcggcgatcccggcatttttcaagattcggtagcccattctgagcgactccggaagatgtgcagcatcgtctttcggcaggggctttcccattcctttgatgccggcgaattctccatccttaatggcgcgcttgattttatcttcagccacgatatgggcaatatccatcatttgtcacctctttttttcgattgaaccgggtcatatcacacggaaatgatggtcccagtttatcccatctttatttttaaagctgtcattcaacagataaactgcctttgcgacagcgtttttcgccctttttccgatgagccttttccaccttttctatttgctggtttcatggtatattgattacgttcgttttttctatcgttccgtgtaaaccgtgatcggaaaaaaggagtgtaacaatgaaaacatttataaaagaaagaggacttgccttcttcttgatagcggtcgtgttattgtgggtgaaaacatatgctgcttatattttaaactttaacctcggcatagacaacacgatccagaaaatattgctttttgtgaatccgctgagctccagcttgttctttcttggatttggacttcttttcaagaaaaaattacagcagacagccattattgtgattcattttttattgtcttttttgctttatgcaaacatcgtctattatagattctttaatgatttcattaccatcccggtcatgatgcaggcaaaaacaaacggcggccagctcggagacagcgcgttttcattaatgagatggacagacgccttctacttcctggataccgtcattttgattattttggcccttaagatgaaaaaaccggctgaaaaaccggcgaagaaatcattcagaatcgttttggcttccgccgtgcttgtattcctgatcaacctggccgtcgcggaatccgaccgacctgagcttttgacacgctcatttgaccgaaactatctggtgaaatatttgggcacgtacaacttcacgatttacgatgccgtgcagaatgtgaagtcaaacagccagcgcgcgcttgccgattcaagcgatgtaacggatgtggaaaactacatgaaggccaactatgacgtgccgaacaacgtctatttcggaaaagccgaagggaaaaacgtcatctacgtctcattagagtctctgcagtcctttatcattgattacaaaattaacggcaaggaagtgacgccgttcttaaacaaactggcgcatgacaatcaaacattctactttgataactttttccaccaaacgggacaaggtaaaacatcagatgcggaatttatgatggaaaactctctgtacccgctgtcgcaaggttcggttttcgtcaataaagcgcaaaacacgcttcagtccgttcctgcgatcttaaaaggcaaaaactatacgtctgccgctttccacggtaatacgcagactttctggaaccgtaacgaaatgtacaaagcggaaggcatcgataagttcttcgattccgcttattatgacatgagcgaagagaatacgaaaaactacggcatgaaagacaaaccgtatttcaaagaatccatgccgctcttaaagagcctgccgcagccgttctatacgaagttcattacgctgtccaaccacttcccgttcggaatggataaagaggacacagacttcccggcaggagactttggcgattcagtcgtcaataactacttccagtccgcgaactatctggatgaatcaattgaacagttctttaatgatctgaaaaaagacggtctgtacgataagtcgattatcgtgatgtacggagaccactacggcatctctgaaaaccataataaagcgatggcgaaagtgctcggcaaagatgagatcactgattacgacaatgctcagcttcagcgggttccgctctttatccacgctccaggcgtgaaaggcggccgtaatcataaatttgccggcgatgtcgatgtcgcgccgaccgttcttcatctgctcggcgtcgatacgaaagattatctcatgtcaggttctgatatcttatcgaaagagcacagagaagtgattccgttccgtaacggcgacttcatctcaccgaactatacgaaagtcgccggcaagtattacgatacgaaaaccggaagacttttagatgattcagaagtcgataaaaaagaagactctctcgtcaaaaccgagcttgaaatgtctgataagatcatcaacggcgatctgcttcgtttctatcagccgaaaggcttcaagaaagtggacccgtcacaattcgattatacgaagcgtgaagattcttcatcagatgatcaaaaagaataaacaaaagccagatcatattatgatctggcttttttatgttcaacttccggctgcggccattgagcgcttttgcaggctgtcggaaagaaccgaataagcgacgactttctttttctgctgtttgacgacatctacatgatcttcgtagctgtatacaaacaccgtcacatctttttttccttttctcgtcttaatgacaagcggatcggctccgttttgcggatgaagataacgctcttcatcacccgggtatatataatgccgttctataaacacagcttcgttaaagtcatcaatcacccggcgtttgtcttcgccttccagacgttttccgccgagggatacggcagcggactcgtcactgagctttgaatgggtttcaaatttgcggagaatccattccaccgctccggtaggaaggcatgtcagtacaatcttaatcaggcttatgacaacaattgaaacaactgcaatccacgtcaccttacatcatctccatacttgttctacatgaatcttaacacaggaggaaacgttgttttttgtacattatgtgaaacttgatagatatgcaaaaaatccggatcgcatatatgatccggatttttcaagtctacttctgatcgtcacggcggacggcctctctcagctcctccgcgacaaattcgacgttcgggccgataatgacctgcgccgttttattccccgttttgataaccccttttgctcccgcttttttaagtgccgcctcattaatgagagacgtatcatgtacggtcagtctgaggcgggtcgcacagtggtcaatcgtttcgaggttttgtctgccgccgagccccttgagcatggcatgttcttcaacggaaccggccgtatcttcactaagcacttcctcttcctcatcatcttcccgtcccggcgttttcaagtttaacgttttgatcagtacgtagaagacgacaaaatagagcaccgcataacaaatcccgacaacgagcagcaaaagcggtttttcggcaatgccgtagctgaggagataatctatcgcccccgctgagaacgaaaaacctgacctgattccgagaatattgacgataaataaagagaatccggttaataaagcatggaccccgtacagaagcggtgataaaaacataaatgcaaattcaatcggctctgtaattccggtaataaatgccgtcagcgcgagtccgatcatcatcccggccgtcgctttgcgcttacttggcttagccgcagcaatcattgccagacatgcggccggaagcccgaacatcataatcgggaagaatcccgtcatataagtcccggccgtcggatcttttgcaaagaagcgggccagatctcccgtttttccgtgaaattcaccaaactggaaccaaaaaatattattcagcacatgatgcagaccgaacggaatcaaaagacggttaaaaatcccgtaaatcccggcgccgataccgccaagcccgatcatccattctccgaatgatgtaatcactgactgaatcggcggccacacaaagccgaaaatcccggccaaaataatggtgatcagcgccgttacaatcggcacaagcctgcgtccgctgaaaaatccgagatattccggcagcttcgtatccttaaagcggttatacgtgtaacccgcaattaaccccgcgataatccccccgaaaacggccatattatttgtcgaattgattgattttacagccgcctcaagcattatataggaaattgctcccgacagagcggcggccccgttgctgtctttcgaaatcccgatcgcgatcccgatcgcgaaaatcagcggcagatgatcaaataccgctgtccccgccgcgtaaatgaacggaatatttaataagtcctccctgccgatggccaaaataatacccacggcgggcagaacggcaatcggaagcataaaagattttccgagtttttgcaaaaattgaagcattttacccatcccccttcttttttcttaaatataacacataagttatctagtgatctataccaattttccttcatttattcagacacggcttgttggttttctatttataaaccagttgtggtaagcttgaataagatgaataaaaatagaaagcgggaatgacaatgattgtaacaaacgatcaagaattagaaggcctaaaaaaaatcggcagaattgtcgcgctggcacgggaagaaatgaagaaaaaagccgagcccggcatgagcacgaaagatcttgacctgatcggaaaggcggtgcttgacgaatacggagccgcttccgctccggagaaggaatatgatttcccgggcgtgacgtgcatcagcgtaaatgacgaagtcgctcacggcattccgagcgcctctaaaatcctaaaagcgggggatcttgtaaatatcgatatttcggcggagttcggcggtttttactctgatacgggtatttcatttgtgcttggcgaaggtgacgaactcctgcaaaagctctgtaattgcgcagcttctgcatttgaaaaagggcttgaacaggcgaaagccggcaagcgccagaaccagatcggcagagccgtctaccatgaagcccgctctaacggctttaccgtcattaaaacgctgacgggccacggaatcggcagaaacctccacgaagcgccgaaccacatcatgaattactacgatccgtttgataacgcgctttttaaaaacggaaccgtgatcgcgcttgagccgtttatttccacgaaggccgaaacgattgttgaagcgggagacggctggacgtttaaaacgccggataaaagccttgtcgcccaagtggagcataccatcgtcatcacaaaagacaaaccgattattttaacggcattgtaatgtttcatttccctcccaaacaggtatacaacaactaacccgaaggagggagacgcatgaaaaaagataaagaacaaatcaaaatcgaaaacgaaatacacgccatgcacggcgtaacgaagcagcagattttagaggatttcgaggaatttaaggcgtaccttcaccagaaaatttccgccggaaaaaaactaggcctggatgacagcaaaatcatcaaaagcgccgccatcctcggggactatctcgccaagcacgaggagccccgcaatgcggaagaaaaactcttacaagagctgtgggacattgcggatgacaatgaaaaacagcatttggcccagctgcttgtcaaacttgccggacactgatacagtgcccggctttttatgttccgttataagagatgtgctacactggagatatgtctgtgaaaggagccatttttcaacatgtggtttattatcttcgggtttattttctttattgaaagcatcattctcaccgtttacggggtgaagaaaaagaaggggctgctgatttatttcggcgtcgtattcggaatcatgacgctcggcacggtgctgttaaaattgaccggccattaagcatgaaaagaccgccctttacatatatatgtaagaaagctttacatctctgaatcgaaaggctcagtttttgcttacccccttttcagcgtctttttatagatgttacaatgccaaaagtttggcaaaaactgaagaaactctcctaagcgggagaacggagaaaggagttttctgacatgcattatggcagtaaaggctggtatgtagaagagttaaagaaaaaaggaattacccactatgaaggaagaaagcttcaaagcttcaaaaagtatttccttgccaatctgctcgaaacaaagaaacaagcataacgtaaatcagccgtgctgtcagtcagcacggctttttttctatacattcatcagtctgtctctttttttaaggaaggagtccctccagctttctgacagcgcttcttcccgcagtacttcttcgatcgccgccagattgccggaatcgcggtatttcacttcattcgcataccagacggaaatgctttctttgcctctcgacagacgcttgaggaccggacgcggatcgacatatccctcttcaagcaccctgaaataaaagccggtaaagccggtctgctgtacacggagcaccatatccttgatgtcatatttgagcgcgagtttgacgcagggctggcgcggctggctcacttggacgacggcttcccccagctgaaacacgtctccgatccacacgtcttgctcggccagccctttgaccgttacattttctccgaacgcggcggcgggaagttttctctcaagcgttgtttcccaatatgaataatgctcggcgggatacacgcacaccgctttatccgggccgccgtgatgcttcagatcagcttgtccgtcccctgcaaaatgggttttatacagcatgacgggggaatccgcgggccgctttacgatgccggaattgatttgtctgccggcaaattcatgaatggcgggctttccgagattgatagataagacagaatagtcttgcgtcacctcgttcacatcctttgcgaaatatcatatttatcctttatcatagtaagaaaaaggtggtttttccatgcttcaatatcgtatggttgcagacggccgggttcagggcgtcggttttcgctacttcgttcagatggaagcagacagacataagatcgccggatgggtaaaaaaccgtgatgacggccgggttgaaattcttgccgaaggccctgaagagtcgctgaaaaaatttgccgaagcggtcagaaaagggagccccttctcaaatgtcacaggcgtaaccgtcgaagaatcacgccatctgaaagggtaccgcaccttttccatcagttactgataaggcttgtcctggtaaaaataattcggcttcacaatcgtattgtcatatgatttatggaaaatgtgggtggaagcaggcgagatcggcgggatcagccaggtccagtctcccgtcagctttctgcccgcgtcttgttcctgctcttcaaagcgcttaaattggttcgccgccgtatggtgatccacgatactgacgccgtgttttttatatgaatagagcactgccttattcagttccacaagcacctgatctttccacagatcggtattcaggctggcggaaatccccatgaccgacgcgatttttctgagcaagtcataccgtttttcatcagcaaggttccttgcgccgatttccgttcccatataccatccgttaaaaggcgccgcgttgtacgacagtccgccgatttcaagcttcatatcggcgataatcggaaccccgtaccatttgagattcatatcggcaaactctttgatatccggatgggagatcggcacttctttcacgagcgtctgaggcaggtcataccagaccggctgctcgtcccctttcattcggaaaagcagcggcaaaatatcaaaatcggtccgctttccgcgccagccgagtttttcacagacagccgtcagctcatatgatgccggatcgccgattcttccttgttctgtctcataccccgcatagcggatgagctggtgattccagatttccacttgtttctccccattcttctcagggggaaaaatcgtaatcgtcggtttaatttttccgccgttcgtcgcgatttcgatatgttcaaataatgcgtcgcgcacctcttctttcgtgctcacgccgcgccggtcaatgacgttcagcgattgccaaaagagacgtccgatacagcggttgctgttgcgccacgccattttcgccccgtgttcaagctcttccgccgtatggacgtaacttcccgtccgatctatctcatcttttatcgcgtgaagacgcgcattggtttccgattccattccgagttcctgatagcagacatcaataaaagctttcgcctcatcccagagtaattccgtatgtttcaaaaaactctctccttcaatttacatctgcttcccattgtatcgtttttagaagtgaacacaatggtttttttgtatcatactggaaagtacaaagaaaaaacacctgtgattttcgcaggtgttttacaaaacggaatgcagtttttcagccaatgtaagcaaatcctcacggtagtttttgcccgtcatcggaattccgtgacccgtcaaaagcgcttccggctccagttcggccagtttccggacggatgctgccgcagtctgcgtatccgctgtgaaatacgccggcgggccgtgaagctcttgcttttgaatgacaacgtccgcaagcgattcctgttcaacagtgatgacggcatcaccggcaagcagaacgcggtctttttgccggaaaaaagaaatatggccgggcgtatggccgggcgtatgcacccatttccattcttcaagaaacggaacggtgccgtctgaaggcagggtctgaacggacggaatgcggatcgcatggcgcggaaacagcggcgacagctttgcgacaagcccttttttcgcatcgggcctggcaggcggataatccgcttttcccgtcacgtacggaagctcctgttcatgaatataaaccggcacatcccacatttcaagcagctcttcaatcgctccgacatggtcaaaatggccgtgcgtcagcatgaccgccttcagctgatacccatctccgaaccggcgtttcatttcttctgtaatcatctccgctgattgcggcattcccgcgtcaaccagaatgatttcccccggagctgagggattttcgataaagtaaacattcgcaatctggacggtcagcccgtaaacaccgtccgccgctttaaaaccgacaccgcttttcaatgaaaagagcggcataaacggatcactcatcatggcacctcctctgatgcctttagtgtgcgacgaagcggatgttttatgttaaaaaatcgtgatcgcgccgatgatgagcgcaaaggccgtcatgacgataacggcaagaaccgcccatttcatcgcaaatttctggtgttcatcaatggttaccccggcaagcccgactaataaatgcgtcgacggcacgagcgggcttaacatatgaatcggctggccgataatcgaagcacgtgcgatttccaccttatccacgccgtatgccacggcagtttcagacaaaatgggcagcacgccgtaaaaataggcgtcgttgggcatcagaaacgtaaagataccgctcgttaaggcaacaatcgccggaataaatccccccatctgctccggaataagcgatacgagggaaatggccatttcatcgaccatcttcgtccccgttaaaattccggtaaacacgcctgctgcaaatatcatcgaaccgatcgcaagcacattgctcgaatgggctgaaattcgctccctttgatcgttaagcctcggataattgacaatcagcgcgatacaaaacgcaatgatgaacagcacggttaaattcacttttcccgatactaaaaaccccactaaagaaagtgttaacagcaaattgaaccaccacagtttcggccgcttccattcatcttccactgccgcagcagtttcatttgtatgggacggctgctttaattcgatcaccccgagccgtttccgttctattcttccgagcacataagcggacaccatcatacataccatgccgctggcaatgacaggaagcatcggacccgtcagctctgccgggtccacaccgagcgcgcttgccgcacgcggcgtcgcgccgccccatggaatcgtgttcatgatccccatgccgacaccggcaattcccgctaaaataatcggacggattccgagcataatatacaaaggcagcatcgcgcttgtcgtaatcatatacgtcgtcgagccgtcaccgtccagcgcgacgagcatggtcagcgctgctgttccgacaacaattttgagcggatcgcctttgaccagctttaaaatacgcgcaaccatcggatcaaataaaccggtatcaatcataatgccgaaatatagaatcgcaaacataatcatgactgcaatcggcgccacctgttcaataccggagatcatcatctcgccgacccggttaaaagaaaagccggcaatcagcgcgaacacgatcggcgtcaacacgagcgccgttaacaccgaaagccgttttgtcatgatcagcaccataaaaacaaacatcataagaaagcctaagattgctaacacagtatgtcccccttatcatgaatacgcttacattttaaaggcccgattcccctttatctgcctttttgctatcttatgagaattgcataatgaagtaaatattttggattttaaagatttttaattttttataacctttttgatcattttgttcatttataaataaaaaagcattccgcaagtctgcggaatccttatttttcgctgctcatcatctctttataaaactcagtctgctcttctaaaaagcgttttgcgccgctgctgtttttataaaagctctcccaatcccgttttttcatcatttgcttccactccgcggatgaggtaatctgtttcaaagcctgatcccaataagcgatctcgccttcggtcatgtctttcggccccatgatgcccctccagtgcgcaaagacaaacggcaccccttgctctttccaggtcgggacatcgctaaagccggagagccttttgtcagaagtaacggccgctaatgtgatttttcccttctgataggcggctctcgcttctgaaatggtcattgaggcggcatctatatcgtgactgataagcgcttcaataacctcattgctgctcccgtattgaaaaaagcggatatcaaacggagaaattccggccatttccgcggctctcgcaaaggagagctggtcatcatttccaagacctggcgcaaatccgatttttatgccgcccggatgtgttttaatagcaccgagcagctgcttcccactttttatctttgaatttttcggaagagcgacagtctgccactcttttgcgataatggccaagggcgtaaaatcagctgccttcagccggctttggcccaagatttcattgcttaacagcaggcttgaattcatactgatgacatccgtttttcgttcattcacgtatttccacccgctgtctccgcctccgccgggcttatagacgatctttacaggccgtcccaaaatatgtttccgctctattactgattgcaaagcctttgccgttacatcccagcccccttgaggcgctgcgggtacgacaatttcaatcggtcccccggctgagcggatgcccgccatctgccgtccgtccaaagaaaccagcgccgcaagcataataagaagcactccaaaccgcttcatttctcccatcccttattcatgtgctaaataatattttcgttccggcctgccgataatgccgtattctaattcagcgagcgcttcttcccgagaaacgagaaactcggcgtagcgccgcgccgttgttctggaggcgcccattttttcgcccagctcttcagccgtcatccctttttgggcagtccggagcgcgtttttgattttttgaagggtaatagagttaatgcctgtcggcagatcactgagctgtttttgttctttctgactgcttccgaaaaacatgtcgattacggattggctcagctccggctgtgagtgcagccattctcttttttcacggtactgcaaaagcacatctgtaaatttacgtgccgaaaccggttttatgacatagtgggaaacgcctgatctgagcgcttcctgcagcagccttgtttcagcagaagccgtaataataatgatatcaacggaaggaaaacggcggcggatgagcgggagcagatctgttcccagctcatccggcatataaatatccaatagcagcagatcaggctgctgtttctcaagcagagataaggtgtctttggcgttgattgctttgccgatgacattgaacccatccagatgttcgataaatttttcatggatttgcgctattcgaaagtcgtcctctgcaatcgcgatgttaatcacacggattccccctttggcctttctttcggtataaacaccgtaaatacggcaccgccgctcttttgctgtgaaatctctatccatccctgcaattcactgacggcttccttcagattggctaagccgtatcctctccttgtcccctttgaagagtatcccttttcaaatatcgttcctgttttttcctgaggcacgccgtcccctgagtccgccacttctatgacgatatccctgccgatatcggtcataaaaaaggcaacctcttttttctctttttcggcgacggcgtcaaaagcgttatcaataagatttccgatgatcgtaatgagctgggatgaacccacatgctccggcagcgactctaaaaagctgttttcatctatcgagagcttcacttttttctcagaggcttttcccatttttcctaatagtatggcctgaacacgctgggaatgaatgttttgaaataggatttcatgctgttcattttggatggcatactcttctttaatcagttcaatggcttcctcgtattctcccagctctaacagaccgagtatcgcgtaaagcttattcgagaattcatgcgtttgcgcccgcagatcctccgagtattttttcatttcggtcagcttgttaatcagctttttgagctccgttttttcgcggaagcttatgaccgctccgtatacttgcccggcctgcctcatttctttcacgtttaagatgaatactttatctccggcacgcacctcaacattcggcggcacttctccccctgacaaaaccggcatgagctttgcgccgggcatgatttcttttatatgccttccgatcatcggctccggaagatgcagcatatcagccgcggataaattcatcatcgttatcgcgccctctttgtttacggcgataattccttctttaatcgcaaggagcatcgcattgcgctcccgatacagcgctgcaatttcatgcggttcaaggccgagtgtatctttacggatgctttttgcgagtgccgccgctcccccgataccgataagaaataccaaacatgcaaaatagcccaaatgccgcagatgcgctttcatatctttttctatctcatcttgtaaaaactcgactgtcaccgttccgacgacttcgttatgatttttttcatccagaataaccggcgcgcttccccggacggctttcattccatcggaaaccggagatccgccgaacataacggttttattttgcagattttgattttcttttgggatgctgctgcgggccgaatgaaatgcaacatgccctttttgatcagtaatgtagacggcgtgcgcacctgcctgttctttcatttgttcaatgacgtctaactttgtaaaagcaccttcgtccgcaagccggaatgcctcttttacaggcggcatgtaagaaatggtttttgctgtttgcaccgccagctgttcagcctgcttctgcccttcatttaattgctgaaaagcaaatataacggtgagcgttccgatgacaagtattaataaagccgtgattaatccggctattttcatttgcagagagacataaaaccgcttctcttccaacacagcaccagccgtcctttcctcctaaaatgataccacttttcaaatctttatttctcatttttatgaattttcgtgatctttttctcttgtaattcctgtaaaaaagtgcgataggtatcattttcctcaagagagataagcaggacgacctttttataaccgctgtgcaaaaaagagactgacagaagccagtctcgggaagtttaattactgacgtatatccagttgacagaatgattctctaagatggctgagatacatttgaatgaccggcaatatcaatcaactttcctttgacggccagacgtccttcggtatttaccgctttgtcacatgtgattaaagtaatctctttttcttttgtctcctgaattatgtttgcttctatttctgaaatcgtgctttttgatgttacagaataaatatagtcttttctaaaatcggtaattacgatttgcgcgcctttttttatgtgtaaaagagggccgaacaataggttctcctgcctcagatggtgaccagccaacgggtagtttccctctcccattttctgatccggccgcatagttgccgcgccgatcagcaggttttcattggttgtgccttttaaaatcgggagctccaaattgacgctgctgatggtgatccgtccgattatcggtttcggtttgcggttaaaactcgactgaacggtttccctaaaaccgggaggatgaattgaatcaaatgcataatccgcttttttcatgttgtttttccgcgcctgttctgcggtcaattcagcttcactatggcttttactgaggtaagcgataaggcaccctttcatgagaggagaggtgacaagaagcagcccggatagaatcagaacagcaatgatcgtttttttaaacatgaagaaaattcctttcttgtacataatacgggatgggtacttgttgtgaaatgactttcgttttaaaaaagcacctgatcgattcttacatgatcaggtgcggtaacgtctatctatttcttgccttcttctttcttgatacaagagccgcggctccgccggctaagagcagcagaataccggccgtcacctgcatcataccgtccgtatcaccggttttcggcaggcttttgcctgtatccggatgattggcattaccattggtatcagggtgatgcccgccttgcttcgtttgatgattcggtgtgtctttcccaagtgcgggattttttaatttcttattcgaaacgacaacttcaacagcttttgactgtcctttttcaattgtgaattcaattggtttttcgttcagctgatagccgtcaggcgcttttgtttcgataaatcggtactgtcccggggctaaacctttcaccgtaaactgtccctttttatccgttttccataacgccggccgtttttcgctggttccgccggtgtttaccggatgtccgccggaatctgttatcttgaattcagcaccctctaacaccttatttttatcgtcatgatccacttttgtcagtgttacatcgccaggtgttaatttgttcttcgcactgatttcgattggttttatgtcggtatttgtaaccttgaatgatattggcgtttgatccaaactgtaaagttcaggcgcttttgtttcgataaattgatattcgcccgctttcagtccccgcacaataatccgcccgtgctgatctgtagtcagaccctctgtcagcactttgccgtttgcatctgtcagtttgaactctgcatctttcaggactttccgtttgtcgtcttgatcgaattttgtgagaacaacactgttcttgatgttaactgcagtcaggacagcctgatccggttttccgctgttctcagccttaatcgtaaacggcacaggtgttgttgacagcagataaccatccggtgcttgtttttcaacaaattgatagcttcccggtgccaaaccgtcggcgtcaatcttgccgccttcttttgtcatcagatcgtctcttacagtttttccatcactgtcagtgattttgaatactgcaccgtctaaaacatttccgtcttgatccttcttgaccagctggacagagcctttgtagttgacggccgttcctgcgtcagacggcttcggctttccttccgccgattctgagatcgtaaactccactttctccgtatttaacacataaccggctggcgcttttgtttcgataaaagcgtagtgccccggtgcaagtccggatgtttctacttttccgtcctgatctgaaaccagatctttttgaactgtttttccatcctgatcgataatctggaagactgcaccttcaagtttccggccttccgcatcttccttcgtcagctgaacagagcctttatagttgacggccgttcctgcgtcagacggcttcggctttccttctgctgattctgagatcgtaaactccactttctccgtatttaacacataaccggctggcgcttttgtttcgatgaaggcgtaacgccccggtgcaagtccggatgtttctacttttccgtcctgatctgaaaccagatctttttgaactgtttttccatcctgatcgataatctggaagactgcaccttcaagtttccggccttccgcatcttccttcgtcagctgaacagagcctttatagttgacggccgttcctgcgtcagacggcttcggctttccttctgccgattctgagatggtaaattcttttttctccgtgtttaacacataaccggctggcgcttttgtttcaatgaaggcgtaatgtccgggtgcaagtccggaagtctctactttgccgtcctgatctgaaaccagatctttctgaaccgtttttccttccttgtcgatgattttgaagactgcaccttcaagcttccggccttccgcatcttccttcgttaaagcggcttttccttgataattaaccattgatcccaattcaacatcaggcacttgattcttttcgttctttgcgactgagaagtgaatcgcttttgtgttcacgataaaccctgaaggagctttcgtctccatcagtcggtagtaccccgctggcaaaccgtttatttcaaccttcccgtttttatcgctttcaatattacttcttattaatgtataggtaccgtcgcttgattttttctccagcttaaatacggcaccagccaaaggattgttgttttcgtcttttttgataagcgtcaccttatttttttgatttatgactttgtagggagcacccgccccggaggatttactgtcgaccgttacaaggaccccgtttacataggcgtcgctgatggtgtagccgtccggcgcttttatttctttcagtacgtaggttccgtaacggatattcccaaacgtaagtttaccggcttcatctgttgtgcctgaacgcagcagctgcttgccgtctttagaccataattgaaaatctgctcccggaagagatgcaccgtctgatcctgttttggatatcgtcatgcttcccttctctcctgatcctgaaccgccgccgcttgaaatggcgacaagcactgagctgttattctcctgggtctgctccttaacatttgtccctgatattgatactttgttgttgacctgaccgctgctgccggaaatattaatgagagaacgatattgtatgacatacgcacggtctatttgtttatagctgcctgtaaaggtgaggacaaatgattgttcaccggtggcattgtcggttttaacatctaatttatagtccttatctttctcaagctgcacatcacccgcagcaaggtttccactgctgtctttcataacgccgttctcatcatattttgcttgatatactttaaaagaatcttcatctattatttggttctcatctggggtgtctttgacttttacgtcatccagtgtcgattggctggcattgacattgatgttccaatcgatatagttcccgctctgtttaccgcctttagaaaccaggtttccgccgtttgcgattgatactgaacccgtcaacgttcggtctgcatggtcatcattatagtactctgctttgtttgtgtattgattctgtttaatgacctgacctttcagtgacgttttgaattcaatcagatatggtacagagtcctctgttttaagatgtacggttaatgtatttttgttgccgtctgacggttcttccacttcgtatttcgaaggatccagcgcctctccttcagtgatggaaccgtttttactgatggtgtactttttgacggcaaccgacccgtgcaaaaattgctgaccatctgttagcgtatcttttatataaggattctttgaaggttcgccattgtaattgatgccgactttccatgtgatttcttttgaaacggcgttgtatgagccgtttttgaatccgttatgggaagtctgattgttcggtgtgaagccgctcgattccttatttgtgcgtttgccgccattttgatcggtccatgtcgactccgccgtattcttgatgttttcattagaaaagtcagtgttgaattttgtcgtatacgtgatcttaaactgactgtttgtttctgcgtaatccccgatcaatgctattgtaaagccttgatttccgggtttttttgttattgtataatctgttccttctttcagcgttttgttctcagtcgtatcttgcatgtgaaatgaatcatcaatgagcgccagacctccgctggtgaattgatcatccagagtccagtctttcattgtgtaacggtttttattgattgtgattgtccaatcaaccgtcttcttctcatagtctgcgtttgaataatttttgatcagattctgctgaatggctgtccccggagtttcctttgattcccccgtatctgtaactgctgtgttggtgtatttgacaggactgtcaataatgaccccatcgttgacttgagattgataaatgatcttatatgctcctgtgacagtttgcttgaatttgatctcaaagccgttcccgttatcagtcagcgtataatccccgccttcttttaatggggcgccttcttgttcgctgccgttttggctgaatgtaatcggaaggactttcaaagatccgggaacaaggtgcagatcgtctgatccgaacgtatccttgatgccggctttggattgatcaatctttttctcaccgtaattgtacataacagcccagctgaacgtttgggtttcccctttataaccggtcgaagatttttcaatcatttttccgtagcccgccgttacggaggcttccgcagaaatcggctccgcattatccccgctgaatgccgccttgtttgtcagcgtgatatttccgcctttagcaggctttgcatcgtcatcaataactgtgtcatagatgagccgataggctgaatcaatcgtcccggcgaatgtgacatttcctttgtcgtcgacggtatagcctgacgttatctcacttccttgactcaccgagccgtcaatattcacatcgagttcatacactttcacagagcggaaggtcaaaccgtccggaagactttccgtcaatttcgcatttttgacttcttcttcctttttattaagatcaaccgtccacgttacctttccggggttaatgcctttatccaatgaccctgatttatcaatggttttagtgacattcggtttaaaataaaccgttacttccggggtatcagagttaaccggaaacttaatcttttgtgtggttgacccttttatttctttctgattgaattgggtgtttacatacaatgaccctttgacattaaaatcttcttttacctcgccgttaaacgtcatgatgacatggccgctcgtattaatggaaaaagttccgtacgtcatgtcgccgttggtcaatggctggttcgtaatgtcattgtgcatgataaattctttaggcaggtcaaattcatatcgatcaccgtcgtttattgttttccccagctcattcgggatcgcccattgaatggtgatatttgccggagaattcgtattcgcacggttgtttttgtcaaatggttttcctttttcatccgtcaatttcacatcagttaaaatattttgcgtaatctggcttccgcctgattgaagacttttaacagcagatttgcttgaaatcaccatttttgattgattgcgttcagcagaagggcttgatttcgttgtctgttctttcttatccctgctgtctgcagatgttgactttttctctgcttcttcctgaggttcagcaggttttgaagaggtgtttttttctgtttcggaattcgttgtctcatctttcttcacaggtatgatcacctgctgggtcttgccggcgtccagttgaaaaagagcttttgccgttttcgttttatctgttacgtcaggtgtaaacttcgccggcagtgtaatggagcctttgacatcatcggcctccgccttttccttgttcactttcacctcaagagtgctgctttttgcttcagctttatatataccgatcacccgatcagctgatttcagctcaccttcgatatcgttatctaatgtaaaactttcagggatctttaaggtgatatttcggtcacttgcatcttccttgtttttcagagaccattcgtatgtcagtgtcacttcatctttcggtgctaaagccggctcactgccttttgatccgtcaacggtctgatgtttgccgtctttgaccgtgactgaatcaaagaatccgctctcgcttagctgcgatccggaagcggctgcgatcggagtaaagctgacaacttggctgaagatgaaaaacagcgtgaagcatgtgatcaatgctgttctcagccttttgcttttttgcgggctgaacgaaaagttcctcactcccaatgtcttattcctccccttttatatagacttacgttcgaacaagcccgtaagcatgggattctccttatccgaaccaaactacattgtatgaaatcgacctatacaaattctgtacataggatcatttcagaaataacgcacaaaaaaagaccggcatcagccggtccagtccttcacttgtttatagcgttcatattcttttatcgcctcttctacttttcccaattgattaaataactgcagtttgtattgtataattttatcgtcacggggctctattttctcgacctgcaggcaaacgtccattgcttgatgctcgttcttttcttgaatgagaaaatcaatcagttcgtacgccttgctgagccacagatgcgccagacgtgttttttccggctccgcccacaggtagccattctccatcagataatggttctcatatgacatgacaatgtccatgtgccgggttaatgcggcttgactgagcgggggagcttcttttaatgtattttcccagtcaactgtatcaacctttacccctgaaagccgaagaatatatcctatatcggtattttctatggattggctgaagggaagctgactgattaatttccgtatctgatatattgtcgagtagagctgagtgctcgcttttgaaacttcataagcaggccaaaacatctcaatcagcatgtctttactgaccgtgcgcccttgattaagaagtaaaaatgcatacagttcacgcgctttggatgttctccacttgactgttatgtatgttttgacaccatttaacgattgataaaagtccaggtttccaaaacattgtataaaataatccgtcccggtgttttcgtctgccgtcctgagctttttattcattcggattcgctcaacggttgtcagcagcctggcattgtcaaccggttttaaaagataatcaacagcatttaactcaaacgcttttatagcgaattcattataagcggtgataaaaataatttgaatattttcattaattgcctgaattgattcagcaagctcaataccgtttatcccgggcatttcaatgtcaagaaacaccgcatcagctgctgaaagccccgaatactccagaacgtccgccggatcttgaaacattaaaatagattgaaaggcgtttgtccgctcaagcatatgattaaaatgaagcaatgccaattcctcgtcatccacaattatcgctttcaaaacgcatcccacccgtcaatatagatatctgaaaataatttcaattataccatgcccaacgccctatatagttggattctttttctttctcttgttgttttatgaagtttaggattacaatatttatacattgaataggataatagaatgaccctgaatgggataaaggagtaatgatgtgaaagaaaaattcatttctatttcgattatttgcggctacgctgccttctttatcatttttatagccatggatcatttctccggaacaactctccctaaagcagaacagggagtgatcaatctgaagaattgggattttcataaggacgggaatgtccagctgaatgggaagtggtttctgtatccaaatcaaatgctgtcaccgcgggatcttcattcagaaaaaggaaaaaaacctgtactcgttgatgtccctgtcaatgtgaagctgttcagaaaaacagccgatacggattacggaacgtacaaactgacaatccgctcaaataaagagaatcaggttttcggaatcagcacatcttttatctacagttcaaaccgcctttatcttaatggacaattgatcggacagagcggcagcccttcagagaaagctgattttgaggctcagaacaaaccgtatacttgctttttcatgcttcacaagggtgataatgaacttgtcctgcaattttcgaatttcggaaaagtgcctggctgggggatcgcaaaaccgataacgtttgggactcaagaacaaattatacgcgaaaatcaaatttcctttcttaatgattccattatgatcacggcttttttcattaccggtttatattttctcggtttttttctgcaaagaacaaaggctaaacatttattgttcttttctgtgatgtgtctgcttttttctgcgattattcttatgatcggaaaagaaagaatgatctttctcatctttccgtctatatcattttcattgctgaatttgttgcgcagcacctcttccgtgcttgtcagcattgcggtttttctctatctcttttatgcatacagagaaattgtgtcaaaaacgacaataaccattttaactgctttttcggggatcatcttggtcactgattttatgtctgtaagttttattgaccacctctcttacattttacattcggtccttgccgttacgactttgttttatattacatatatttttacgattgctgccatacggaagataaaaggaagcatgtaccttacgctggcatctgtttcaatgagcgcctttgtgattcttacgacaatttcagcttacagcggcagaacggctgtttcttttaattcgatttattcattgccgacagtcattgctttattggcactggttcttctgatggcgcagcaattcgccggggctttccgggacaatgaagtcctctcacgtaaattagtcaaaatgaaccagctgaaagatgaatttatcgccaaaacttcacacgaattcaaaacgccgctgaacagcattattaatatatgccagacgcttgtagccggcagaaaaaagaagacgatagaggaagagaaagaaaacatgcagctgatcatcaggatgggctacagactttccaatctcgtaaatgatattcttgatttggaaaaaatgaagcagggtctgctgcagattcgtcctgttcctgttgatgtgcatgccgcaatatgcagtgagatgaacttctaccggcttttgtccaagcataaaaatctcgacattcttaatcatgtaccggacgatctcccctttgtgcttgcagatgaaaaccgatttcggcaaatcttaacgaatcttgttgaaaatgcaatcaagtatacatccgaggggaaaattattctttctgccgaaagcctgaataacagcatgattcaaataaccgtggccgataccggcagcggcattcctgaagctgatcttgaaaccatttttgattcttttcagcaagcgggaggaaataacgaggatggaacgggtttaggtttaagtattgtgaaacagctcgtcaagctccaaaacggggacatctgggcagagtcggaagaggcgaaaggttcagcatttcattttacattacccgccgctcaaattgattctttaccggaagcaaagatcggacttcctaaatcgcagcccggacagaaaatgccggatatttctttgagaacgccttatcactcaaaaaaaatcgatgctccgacaattctgatagtcgacgataacatcgagagtttaaaaattttaactgatatgcttgaaggtgttccttataacgtaatcgcagtaaaaagcggaaaagaagcgcttcaagctgtctcttcctcgaagcttgatttggtgatattagacttgatgatgcccgacatgacgggatttgaagtctgcacaaatatccgcgaaagattcagtatggtcgagctgccggttcttatcgttacggcagccataatcagccatgacaaatacaaggcttttcatgtcggtgcaaatgatattttacagaagccttatcattactctgaattcaccgcgcgtattaaaaatttaattttgatgaagcatacggctcaccaagccacaaatttggaaatggcatttcttcagtcgcagatcaagcctcactttctttacaatgtattaaatacgattatcgcgcttagtcatttggatattgaaaaagcacgggaaaccactgctgcatttacaaactatttaagaatgagttttgattttcaaaatacttcggacatcagctcattcaaaaacgaactttctatcattacgtcgtatctggctatcgaaaaaacacgcttcggcaagcggctggaaatcctttttgacatcgatgaggacatggacttcagccttccgcctttaatgatacagccattggtggaaaacgccgttcatcacgggatcagcaagaaaagaggcggcggatgggtaaagctgacggcaaaaaaacaaagcgaaaacacatatttaattaaagtggaggataatggaaccggcatcatgccggatatacaaaaagatatattgtcttcccatgttgaccgcagtgtcggcctgaaaaatatcaatcggcggctgaagcatttttgcggaagtgaattgactattgagagcacaccggatgcaggcaccgcggtttcgatgatgattcacatcaccggcacaacggatgattcaaactcattaaaaacgtcttcatctgtttaagatactgattaacttcagaaggatgaaatacttctgccggctgtcgggaaattcccgtcagcctttatttactcagaaagacgaaaaaacaaaaaagcttgaagaaaaagtgataccttctccaagcttagatgattcacaccagtctggccgttttcacttaagaaatcgtaactcccgcgcttgcatatcccgccactgtattaataagagaaagacctgtcgcagtggcggagaataccattaacagccgggtttgaggagttaccgcaatgttcagccctgtagtgattccattgctgatgctgccgatggataatacgccggtaagggcaggagccaaggtgacagatgctccgggaatcggtgtgaacgtattgttcggcacagttgaactgtataattgtgcagttatcgtgacagtcgagccgacaagtgacaatgctgcggttgtactgaaataggcggcaattgatgtaatggttccgcttctcggagcagaaaaagcaaagttcagcagagtccctccggccccggtaagatcaattgcacctcctcctccgacattgacgcccgtcacagaactgccgaacccgacaaggctcaccgttccgattaatccgccggcaatggtggtcacggcagttggaaggcctgaagcataaggaatgatcgcgcctgctccggtggctccggtggctccagtggctccggtcgttccggttactccggttgcacccgttactcctgtggcgccagttacccctgttgatccagtggctccagtatctccggtcgaacccgttactcccgtggctccggtgattcccgtggctccggtgattcccgtggcgcctgttactcctgtgacgccggttacccctgttgctccggtggcgccggtgattcccgtggctccggttacccctgttgatccagtatctccggtcgagcccgttactcccgtggctccggttgctcccgttactcctgtgacgcccgttacccctgttgatccggtggcgccggtcgttccagtggcacccgttactcccgtggctccggtatctcctgttactcctgtgacgccggtgattccagtggctccggttacccctgttgatccagtatctccggtcgagcccgttactcccgtggctcccgttactcccgttactcctgtgacgccagttacccctgttgatccggttgcgccggtgattcccgtggctcctgttgcacccgttactccggtcgttccagtatctccggtcgagcccgttactcccgtggctccggttacccctgttgatccggttgcgccggtcgttccggttactccggttgctcctgtggcgccggtgattcctgttgttccggtatctcctgttactccggtggctccggtggctccggtggctcccgttaccccggtggctcctgttactcctgttgatccggtggctccggtgattcctgtggctccagtgggaccggtagcacccgggtctccagtcgctcccgttactcctgttgcacccgttactcctgtgacgcctgttgctcctgtgacgccggttaccccggtgattcccatggctcccgtcgcaccagttattcctgttgctccggtgactcctgttatccctgtggcacccgttactccagtcgttccggttactcctggatctcctgttggaccagttactcctgtggctccagtgggaccggtggcacccgggtctccagtcgctcccgttactccggtggctcctgttactccggtggctccagtcagccccgttgccccagtctctcctcttccatgataatgattcggatgacagcacggacaccatctttcatgacagcaagagttttcgcaacagcatccttcacagcaatgtgcccgattatgatagctgcgcctttgatttcttcttttatgttgagaatgacagcaacaatcattacaatgccggcagtcgcaatcccaagaatcacatctgctataccaagtatctccttttctcattacaccacctcttcttgcataatattttcacaaagacaaatggtgtttcaaaattccctttaaaaatatcaactggtctttaagtttgcatgctgcacagcatttacagaaaaaagacccgaccgtatatcagtcaggcctttcacctttaaaatatcagtttgctattttcatgaggttgtcggaaaactaatgctgttaaaatcaatattgagagctgttgctgttgttatattactagcagttgtgaaaacaactctcagctggtacgtgtttgttcctgcggtcggagctgtatctactgtagtatcagcaatcggaaacctttcagtagttgcgctaataatagatcgcgacaaaagtcttgtatgaatctgtactgctcccctatataatcttatttcaaagacaaagtttgaattggctgtagatgttacctcgacgctgactgaataatccagctttatattctgcaaagcattaactgggattgccagcgtagcaacaggaatttctgtatttaatggcgggtaaacagtgagcggcccgttggttcttgtgaagagcaaggtcggtgtactgcctgttgagcctgttgggccggttactccggttgagcctgttattcctgttgcaccggttactcccgttgggccggttggtccggttggaccggttgctcctgatgctccggttggaccggttgcacctgttgctccggttactcctgttgcacctgttactccggttgatccagttgggccggttgcaccagttgaccccgttgggccggttgatccagttgaccccgttgggccggttgatccagttgaccccgttggaccggttgatccagttgaccccgttggaccggttgagcctgttactccggttgagcctgttgaaccggttgagcctgttactccggttgcgcctgttgctccagttgatcccgttgggccggttgcgccggttactcctgttgatccagttgggccggttgcgccggttgctccagttatccctgttgttccggttggaccagttgcgccggttactcctgttgagccagttgggccggttgcaccagttgaccccgttggaccggttgggccggttactcctgttgcacctgttactccggttgatccagttgggccggttgcaccagttgaccccgttggaccggttgggccggttactcctgttgagcctgttggacccgttgggccggttactccggttacccctgttgatcctgttgcgccggttgctccagttactcctgttgagcctgttactccggttgagcctgttgatcctgttgatcctgttgaccccgttgggccggttgatccggttggacccgttactccggttgagcctgttactccggttgatcctgttattcctgttgctccagttgaccccgttgggccggttactccggttgctcctgttattcctgttgctccagttgggccggttgctcctgttgttccagttactccagttgggccggttactccggttgctcctgttattcctgttgctcctgttgatccagttgatcctgttgatccagttgatcctgttgatcctgttgatcctgttgatcctgttgatcctgttgatcctgttgatcctgttgatcctgttgatcctgttgatcctgttgctccagaagcaccgatttctcctgttggtcctgttgatcctgtttctccagttactccggttgcacctgttggaccggttgcacctgttgaccccgttgggccggttactccggttgagcctgttactcctgttgggccggttgcacctgttgatccggttattcctgttgatccggttattcctgttgatccagttgggccggttactccggttgatcctgttattcctgttgctcctgttgatccagttgatcctgttgatcctgttgatcctgttgatcctgttgctcctgttgctccagttgctccagttgatcctgttgctcctgttgctcctgttgatccagttgatcctgttgggcctgttgctccggttggacccgttgctccagttgtccccggtgatcctgttactcctgttggcccggtttctcctgttaatcccgttggaccggttactcctgttgagccggttgctccagttgatccggttaagccggttggcccggtcgaccccgttgggccggttacacctgtcgggccagttgctccggttgagccggttggcccggttgagcctgttattccagttgaacctgtcggcccggtttctcccgttactccagttgatccgatttctcctgttgcaccggttactccagttactcctgtttctccggttgggccggtcgatcccgttgggccggtcgatcccgttgggccagttgctccggttgagccggttattcctgttgggccggttgcacctgttgcgccggttgatcccgttactccggttgggccggttggacccattgttcctgttattcctgttgctccagtttcgccggttgatcccgttgctccggttggtccggttacaccagtcggaccagttgctcctgttgcgcctgttacaccagtagggccagttgctccggttgagccggttggcccggttgctccagttgtccccggtgatcctgttactcctgttggaccggtttctcctgttgatcccgttggaccggttactcctgttgagccggttggcccggttgagcctgttattccagttgaacctgtcggcccggtttctcccgttactccagttgatccagttgatccgatttctcctgttgcaccggttactccagttactcctgtttctccgattgggcctgttattcctgttgggccggttgcacctgttgcgccggttgatcccgttactccggttgagcctgttgatcccgttactccagttgatccggtttctcccgttactccggttggccctgttgcaccagtcgggccagttgctccggttgagcctgttgatcctgttgcacccgttgggccggttggacccgttgagccggtttctcccgttattccggttactccagttgaacctgttgctccagttgatcctgttactccggttgggccgatttctccggttgttccagttgatccagttgcaccagttactccggttgagcctgttgggcccgttgttccggtttctcccgttactccggttgctccggttgaccccgctactcctgtgacgccagttacccctgttgctccagttgtcccagttgatcctgttactcctgttgatccggttgatcccgttgcaccagtttctcctgttgctcctgttgttcctgttggaccggttattcccgttggacccgttgggccgatttctcctgttgatccggttgctccagttgatcctgttgctcctgttgatcctgttgttcctgttgatcctgttgatccggttactcctgttactccagttgatcccgttactccggttgggccggttgctccagttgaaccggttactccggttgggccggtttctccggttggaccggtttctccggttgagcccgttactccggttggaccggtttctccggttgagcccgttactccggttggaccggtttctccggttgagcccgttactccggttggaccggtttctccggttgagcccgttactcctgttgagcctgttgggccggttactccggttgatcctgtcggcccagtcgatcccgttgggccggttacacctgttactccggttgttccagttggtcctgttgtccccgttgcacctgttactccggttggaccggttactccggttgggccggttgctccggttgagcctgttactccggttggaccggttactccggttgggccgattgctccggttgagcctgttactcctgtgacgccagttacccctgttgctccggtggcgccggttggaccggttactccggttgaaccagttgatcctgttattccggttggaccagttgaacctgttagaccagttgaacctgttactcccgttacacctgttgatcctgttattccggttggacccgttacgcctgttactccggttgttcccgttgggccggttgagcccgttactcctgttgatcctgttgttccggtttctcccgttactccagttgggccagtttctccggttgttcccgttactccggttgttcccgttgaaccggtttctccagtggctccggttatccctgttgctccagttgcgcctgttgggccgatttctccggttgttccagttgatccagttgcaccagttgatcctgttgatcctgttgcaccagttgatcctgttgatcctgttgcaccagttgagcctgttgatcctgttgcaccagttgagcccgttgctcctgttactccggtttctccagttgcgccggttgatcctgttactccagttgatcctgttactccggttgggccggttgctcctgttgggccggttgctcctgttgggccggttgctcctgttgttccagttacaccagttgggccagtttccccggttggacctgttactccggttgagccggttggcccggttgagcctgttattcctgttggaccagttgatccgatttctcctgttgcacccgttgggccagttactccagttgatcctgttattcctgttgcgccggttgatcccgttactccggttgggccggttggacccgttgagccggttgctcccgtttctcctgttgttccagtcggtcctgttgctccggttgcacccgttgatcctgttattcctgttggaccagttgaacctgttactcccgttacacctgttgatccggttataccggttggacccgttacgccggtttctccggttgagccggttgctccggttgtaccagttgatcctgttattcctgttgctcctgttgggccagttactccggttgctccggtttctcccgttactccggtttctcccgttactcccgttgcaccggttactccggttgagccggttggacccgttgggccggtttctccagttactcccgttgcaccggttactccggttgagccggttggacccgttgggccggtttctccagttactcccgttgcaccggttactccggttgggccggtttctccggttgagccggttactccggttgagcccgttactcctgtgacgccagttacccctgttgatccggtggctccggttggacctgttattccggttagaccagttgcgccggttactccggttgcacccgttgatcctgttattcctgttgaacctgttactcccgttatacctgttgatccggttgatcctgttgatcctgttactccagttgctccagttactcctgctgctccagttgatcctgttgatcctgttactccagttgccccggttgctccggttacaccagttgctccggttgggcctgttacaccagttgccccggttgagccggttgctcctgttgggccagtggctcctgttatccctgttgctcctgttatccctgttgctcctgttaatccggttggccctgttgctccagttgcaccgatttctcctgttggtcctgttgatcctgtttctccagttactcctattgcacctgttgaccccgtttctcctgttgttccggttggacccgttgcaccggtccctcctgttgatccagttaggccagttgctccggttgatcccgttgctccggttaagccggttggcccggttgagcctgttattccagttgaacctgtcggcccggtttctcccgttactccagttgatcctgttactcccgtttcacctgttggacccgttgggccggtttctcccgttactccggttgctccggttgaccccattactcctgtgacgccagttacccctgttgctccagttgtcccagttgatcctgttactccggttgagcctgttgatcctgttattcctgttggaccagttgctcctgttgaacctgttagaccagttaatcctgttactcccgtttcacctgttggacccgttgggccggttgctccggttgttccagttgcaccagttgggccagttgctcctgttgagcctgttgctccggttactccagttagcccggttattccagttggacccgttgggccgatttctcctgttaatcctgttggtccggtttctcccgttactcctgttgagccgattgatcccgttgctcctgttgttccagttggaccggttgagcctgttgcacctgttgcgccggttgagcctgttgcacctgttgcgccggttgagcccgttactcctgttggtcctgttgtccccgttggaccggttgctccggttgaccccgttgatcctgttactcccgttgcacctgttgaaccggtttctcctgttggacccgttgggccggttgagccggttgcacctgttggaccggttacaccagttactccagttacaccttttgatcccgttacgcctgttgctcctgttgcgccggttggtcctgttgggcctgttacaccagttgctccggttactcccgttgctccagtcgcccctcttgctccggttactcctgtcgctcccgtgggccccgtcgctcccgtggggcctgtaattcctgttgagccagggtcacccccggtttgcgccaatgaaacgtcgtctattaatactgtgccagaagaaactttacttaatataatgacagcagaggctgtgccagaaggaaccgtacttgttttataaatttcagaccatgtatgaaagagcacgttcggcaaatttccgggtgtgatattttcttgaatggaactgatttcttcacctgctgcactgacaaatatgatctggagggttacctggggacttggctcatttcctagcgttgccagtgatacgaatagagtcagtgacttggctgaaattgggacaatttgactgaggtaagcatatggctgagttccaataaattgcgctgagtatctccctgaatgtgcaaacaaactgttaatctgggtatttgccgaactccatcctgctaatgtgccggtttcaaagcctccgttcataatcggattattcattcaatctttttccctctccttccagtagacagccttactttttaagacagcatattaatacgggctctcttttgacaacctaaataaaaaaggtgatttcttttcatcaccttagtccgatccttgaacggggaatcccgtcgcgataagggagccgttttccgctgtcacttgtgttacataattcgaagaaagcacggataaaaagagctggtacgcggctgtttctcccgctgccatttcgtcgatgtacgtaaaaggaattcctatgatttgcccgcctgaagaaaagaggttccgctcttgtctctgtgtttgaatagataccccatttctttgcagatcgacagctaagaccagtgagaaattagacgcgagcggatccagttccacatttacttgtatgacggcatccgtttttacaaattgatccgtcggcgcatctatcacagtgcttaacacgtttatcggtgttccttctaatggaatcgtcatttgttctgtattattttgaaaagcgacaaccggaaccgctcccggcggtccctcaggacccggaggaccgggcggacctgcctccccttgcggacctcgggagccggcggggcctcttttgccttcagggcctcgcagctggggtgcgcacaaggcggatcgattttcatctaaagacggaaactgttttttcgtcactatttccggctgttcattatcacatagtaactgttcataccagcgtttcatatgtctgctcatatatttgtaaggcttctgtttcaatatcatgtattgattacggctgctgctcatattatcaccccggcaatattgtattccaactgaagccatcatgtgctgggccttcccatcccttatagaaacaaaaaaaggcagacctgagtctgccttttttcttctaccataaacctaaaactttccaccataatccaccgatgacaagccatgtcacaatatggacgatcgacaggataaagccgatggaccaccatttgctttgtgatatatagcctgctccgaaaaagaccggagccgctcctgagccgtaatgcgtcgtcgaaccgaagaggttgctgaaaaacgccaggctgagcgctgccaatagcggcggcgcgcccgctgccacgattacggcgagaaatgccgcgtacatggcgctgatatgcgcggttgcgctcgcaaagaaataatgagtgtaataatatacgacaattaaaatcataaatgccacaatccatgaaaaaccggaaacagaagatttcatcatattgctgaaccaagacaccatgccgagttcattcaggaaattcgccagcataacaagcgccgcgaaccaagtcagcgtatcccatgcaccttgttcctttttgatgtcctcccatgttaatacctgtgacaaaagcaaaacggataatccgatcaaagccgttgtcgttgcgtcgatatttaaacttcctccgaaaatccacagcgcaagcaccaataaaaagacgatgaccatggagagttcggattttttaaacggacccatttctttcaatttttccgttgcgattttagccgcgtccggtgtttctttaatttccggcggatacagcttataaatgacgagcggcgtaatgattaagctcgccaatcccggtacaatggccgcgattgcccagcttgtccatgtgatgtccacccctgcgacatcatgggccagcttggcgatcagcggattcgccgccattgccgtcaaaaacatcgcagacgtaatcaagtttccttgaaaaccggtctttaataagaaagcgccgattttccgctctgttccgtctgccggcgttgatccgaatgtttcggataatgatctgataataggaaaaataatgccgcccgcccgtgccgtgttgctcggaatggcgggagataagattaaatcactgaaaagcagtgaataagaaaggccgagtgttttcttcccgaaccgttgtacgaatacgtaagaaattctggcgccgagcccggttttgataaacccccgggaaataaaaaaggcgatgacaatcagccagattgtcttgtttccaaatccgcttaacgtatcttcaatagacagcgttcccgttaacgcggtgactgccaatgcaaaaattgcaattgcgcccattggcaagggcttggagataaagccgataattgttgcgacaaaaatagcgaacaaatgccatgctttaggttcaagtccggacggcgcgggaataaaccaaatgattaatcccacagcaacagtaataagcaatggaatgatttttactgcctgctgtttttttgcgtctttttctgaagccattacaggtctcctcctattttgttatcttccatcccctatcccattttactacttaactaagttaataaatgtttttgttaattaaaaaacacaaaggaatattttcctttgtgtttcttgtttcttattttaatattcccgcaccggcattagatataacatcggattttacatttgatgatgagccgatggagccgtgcaatgacggtgtccagccgacggactgacttaatccgttggcggctgacgcgttaatggcggcgccgtttaaaagcgtgccgtcttcatgaagcgcttttccgccgctgaaaacgctgatgaccttatcagcagccagtcccggcacttcaaagacattattctgggcatatatttttgacgcatgtcccgcgccccatgcatagctgaacgggtatgcggcgcttttcgagcctgcgtaaaaattattataaatgtgaacctgcccgtaccggacccgcggtgcgcgctggacgatgttctggtaatagttatggtgaatggtcaccttcaattttccttcatctgacgtcttgctgtcgctgtttccgatgacggagcctttgtcatggtcatgatatttattataggataatgtcacataattcgccccgttggccatatccgtctggccgtcatggtgctgatattttctcccgtaatagtagggaaaaccgctgtcaggattcgatccgtcattaaaggtgcaatgatcgatccatatgtgcgtcgccccgttaatggtgatattgtcatattccgagttccagttgccgctgtccccgtcagtcgggtcccattgcggaaaataatcataagcgtcttgaaattcaatattgcggatgatgacattgtcgacgccattcttaatattaaaatttccgcctgtcactttggcatttgagcctgagccgatgatggtcgtatttgaagggatgtcaatcacgacctgcgctttctgttttttttgggatcgctgtctggcatcttcctgggtgcctgacggcgcttttttcccccatttagccgggtcgtacgccttcagatatgcgtttagatcatatgccggatctttataatcattaaagccgagcgttttattgttatcgtttgtattcatattgattgtgccttgtatgtaaataatcttcggcgtgctgttggcgcttccccctaatgcagaaacaagctgctttctgtttgatacggtgtatacgttggatgatgaggctttcgctcccccggttgttccgccaaaagcagctccccagccgtcatttgttcctaacgtctgccggcctaggtcagcggcatggacgtccgctgggatcatacataaacaaaccgccagcataaatagcatttttttcataaattgtgctcctcctgatttacattccaatttattgcaatcaaattgtatcaaatcagttgaaaaacagcaccgcaaatgtagtgaaggtgcctttcggttttattgcggaacccgcaaaaaaatcccaagggaccgaaaaccccttgggatctaattcagcttacgcccatgattttactttttcgttatccgtgacaaacagaagaacttttccttcatctaagcgcttttcaaattgtgatgcttcctcctccgaaaagccgatttcgtgaattttgttgcggagctcgtcgccttttttattaaacatattgccgaccgcgtgtttaatgcccgtttctttcgctccgatggtattgacatccgtattgtcggccaggcgatccgttctgtcgtcatcatgagaaagcacatatacgtcttcttttgcgacacccaattgctgaagctcttttacgtcctgcatcagtttttgatcatttgtatattctcttactaccggtttcattgataagtcctcccttttgtttttgtatattggttgtttacccgcttcatcgagtatcaaacaaaagaaagagagttccataaaaattcaggaagattgtcagtggatattttcttccgggacatgttacagtaggagaagacactttgtcagaaaaataaaaacctttacgagccgatcaagcagggaggtgcttcctattcattatttttcaccggaacagcgatttaacgcttgggttgtcagtgatttagtgaagcaggtattccgccggcatacccgctgcccggacggaataaaagagcttacggcctttgctgaagatacctttcatattaatatcgatttcgttttctctattattataaatatcggtgatatagaatccgttctgccgaaagaaattgagaatacgctcggttcttatctgaccgcgcttcggcctgtgatcaccgccgacatgcttcattcttctaaaacgaatgcctatgaatatttggaacatgagaaaaacaccgacatatatcagttattcttttaaatgacgcttatgaagaaagaagggccccagcccttcttttttttatgccggctgacggtttgattttgtattcgggaaatggttcgtgttacatttggaacaaacactcatgttgaaggaggatgtagtatgacgaaaaatcagcagcagattcaattggcaagacgcccccaaggcgttcccgtccatgacgacttccgatttgaaacgattgccgttcccgaaccgaaagacggcgaagtgcttgtaaaaacgagttatgtttccgttgatccgtacatgcgcggacggatgcaggataccaaatcatatgtcgagccgttcgctttagatgaagccataacaggcggagttattgccgaggttctgacagacggaaataagctaaaaaaaggcgatgttgtgatcgggaatctcgcgtggcaggaatattcagccgtcaatgagtccgccctccgcaaattggatacggatatcgcacccgcccaggcctatctcggcattttagggatgaccggactgaccgcttacttcgggctgcttgatatcggccgtccgaaaaaaggcgaaaccgtcgtcgtttcaggagctgcgggcgccgtcggctcaacagtcgggcagattgctaaaatcaaaggcgcgcgcgttgtcggcattgccggatctgacgaaaaaatcgcgtatctgaaagaggagcttcagtttgatgaagccattaactacaaaacggcagatgatattcaaaaagcgcttgaacatgcatgtcctgacggcgtcgatgtctattttgacaatgtcggcggaccgatttcagatgcggtgatgaacctgctgaatgaattcgcccgcattccggtatgcggagcaatctcttcatacaataccgaaagtgaagaggaagacatgggcccccgcgtgcaggcgaagctgatcaaatcaaaggcgctgatgcagggattcatcgtcggtgattattctgaccgcttttctgaaggcgcgaaacagttggctgaatggctcaaggacggaaagcttcattatgaagaaacgattacggaaggattcagcaatattcctgacgcgttcctcggcctgtttaaaggagaaaataaaggcaaacagatcattaaagtataaatcaaaaaaacggagggcttttttgccctccgtttcttatttctcagatagtcttccgcctgaatagacagcctctttcagttcaattccgagtgacttggccatttttttcagtttggattcttccatcggcgtgacaaggctgagtacggttccttctttaccggcacgccccgtccggcccgatctgtggatatacccgtcttcattcggtatgtccgcgtgaatgacatacggaagatcatcgatatcgagtccgcgcgccgcaatgtcagtggccagaagcagcggaaattctccccgttcaaacgctgataatatgtttgcccgctccatttttttcgcttccccgtgcagaatgccgagacccacatggtgatacgcaagtttttccgcatagacgcttaaattcccgatatctctgacgaaaacgagcgcatgcatgccgttcagccgtgacagcttttgcagcagcttcactttatcccgctgatcgcagacgaggtattgatgcgtgacccgcgccttttcctccgtattccgcttcactctcaaaacggacggttcgtgtgcgatcgcattcagcacctcttctgtctccggctgcagcgtagctgaaaagcttaaaagctggcggtctctcagcgtcgttttaatgatttttttcatcgtttcgcggtgttcctttgtcacaagctgatcagcttcgtcaagaacgatcgtcttgacttcatgcattttcagctttttcgcctgaatcaattcaagcacccttcccggtgtgcctgcaatgatatgcggtttatttttgagcttttccacctgctttttcacgtttgctccgccgatcaaagacaaagcgcgaagatcagagccttttttccaatcttgaatcacttggaaaatctgcatcacaagctcgcgggacggcgctaaaataatcacttgcggatgtttttgctccgggttgatccgctccaaaaccggaagcgtgtacgccaatgtttttcccgttcccgtcggggattcggcgatgacgtcttttccttccatgatcacctgagcggctttttcctgaatgacggtcggctcctgaaagcctgacgcctcccagttttcggcgataaatggttgtgtatgctgtaaaaatggccatgtttgggtcatgtcgttctcctcaattcttaaaatctactccatagtatctcaaatgcacgcgccaaacgcaattttctttttccttccaagccttttaacaaacggtctcctcctttataatcataaatgagaaagacacatgacgaaacagcgtgtctgataacgatagaggtgtaatgatgagtattttatccgtaaaagatttaagccacggcttcggtgaccgtgcgctttttaacaatgtatcgttccgtcttttaaaaggggagcacgtcggcttaatcggagcaaacggcgaaggtaaatcaacgtttatgaatattattaccggaaagcttgagcctgatgagggaaaagttgagtgggcgaaaaacgtgcgcgtcggctatctcgatcagcataccgtgcttgaaaaagggaaaacgatccgcgatgtgctgaaggatgcgttccattacttatttgcgatggaagaagaaatgaatgagatttataacaaaatgggcgaagcggaccctgacgagcttgagcagctgctggaaggtgtcggtgtcattcaggatgccctgacgaataatgatttctacgtgattgacagcaaagtcgaagaaatcgcccggggcctcggcttgcaggatgtcggacttgaccgtgacgtcactgacttaagcggaggacagcggacgaaagtgctgctcgccaaactgcttttggaaaagccggaaatccttctgttggacgaaccgaccaactacctcgatgagcagcatattgaatggctgaaacgctatttgcaggaatatgaaaatgcgttcatcttaatttctcacgacattccgtttttaaacagcgtgatcaatttgatttatcatgtggaaaaccaagagctgacgcgttatgtcggtgactatcatcaattcatggaagtatacgaagtgaaaaaacagcagctcgaagccgcctataaaaaacagcagcaggaagtggctgagctgaaggatttcgtcgcccgaaacaaagcgcgggtcagcacgagaaacatggcgatgtcccgccagaaaaagcttgataagatggatatgattgaactggcggctgaaaaaccgaaaccggaattccattttaagcctgcgagaacgtcaggcaagctgatttttgaaacgaaggacttagtcatcggctacgatactccgctgtcacgcccgctcaatctcaaaatggaacgcggccagaaaatcgccctgtacggcgcaaacggcatcgggaaaacgacactgttaaaaagcctgctcggtgaaattcagccgctctcaggcacggtggaacggggcgaacatcaatacacgggctatttcgagcaggaagtgaaagaaaccaataacaatacgtgtatcgaagaagtgtggagcgaatttccttcctttacccaatatgaaatccgcgccgccctcgccaaatgcggcctgacgaccaaacatattgaaagccgcgtctccgttctcagcggaggagaaaaagcgaaggtcagactgtgcaaactgatcaattcagaaacaaacctgcttgtgcttgacgagccgacaaaccacctggatgtcgatgcgaaagaagagctgaaacgcgcgctgaaagaatacaaaggctctattctgctgatttcccacgaaccggaattctacatggatatcgcgacggaaacatggaactgtgagtcttggacgacgaaagtgctgtaaatacaaaaaggaactcccgcctgtgcggaagttcctttttttcttaatgtccggcttttattccggcgagatgtttgcgtcccagaagcaagatcagcatacccgccagcacgaccgctcctcctacaaggtacggcgtgtgggctgtaaaacgctctgacagcattcccgcaatccacggcgcaatggctcccccgatgaaccggacagagctgtatgcagaagatgcgatggaacggtcgacaggagcggaccccatgacggctgtcgtcatgatggtgttgaccatcccgagcacagcgcctgcgatgacgatgcaagtaatgacaagcgccatgtgttctgtccaaatgcccataataaacaaaatcacggcaaaagagatgaacagaacgacgagcgaacggactgtgccgagcgctttatgcaaggccggcgctgtaaatacagacgtaaccgcaagcaataaaccccagccgaaaaagacatagccgagaccgtgctcatccagatcaagcacaaacggtgaataggcaagcaaaataaagaaaccgaagttgtataaaaacgccgccgacgccatggtcagcaatcctttatacttgagcgccttcattgcgtcaaacacaccgacgcgtttcgccggtttcggcagcttcggcagcatgagcgaaatcgcacaaagtgcgattaacatgaggacagacactccgaaaaacggagcgcgccatgagatgctcccaagctctccgcctgcaagcggtccgacggaaatccccagaccgagcgcggcctcatacaaaataatggctttggcgctgcccccgacggacactccgacgatgacggcaagcgcggttgaaataaagagagcattcccgagtccccagccgccgcgatagccgacaagctgagcgattgaacctgagcttccgccaagggcggcgaacacgatgataaaaataagtccgagaagcagtgtccattttgcgccgatccggctggaaatcgccccggagaaaaacatcataaaaccggtcacgagcaaataacttgtaaacagcagcgatacttcactaggtgaagcatgtaattgtgcggcaattgccggaagaatcggatcgacaagtccgattcccataaaggaaataacacaggcaaacgcaaccgcccaaacggctttcggctggctgaataagcctgttttctgttgtgatgatgtatccatttgatcaggcctcctatttgatccattaaaagaaacgctatatccatagcgtttacagcaaaatcattcgattgattgaatggcgcggtcagctttttctttcattccgttaaggcgctctttaaaatgcaggaatgtgctgatcttttcatcaatcatctcaagctggtgattcaaagcgtgctgaatttcttccagcttttctttccgttccttcggatccagtgacaataagtacccctctttgtttaattccagctgacggctcatctccataaactgctgaagctcctgaagggaaaaaccgagcacttcttttgtgcttgttactttttcaagttcctccatatcatcctcagagtaaagccggacgccgccttctgtccttttaggagcaggaattaaaccaatctcctcgtaaaaccgaatggttcgttttgtcaatccgcttcgtttggcaacttgatcaatcttcatccattccaaggtgaatccccctcttgtcgtatctgatactattatacaccttttgaaccttaacgtaaacgtaaacttttaaagaaaaaattttgttataatatgctatcattagatatttcgatgcgatttgtgtttaaacttggacggtttcggacgctttgctgggattgctttagacggacatgaacaagaacatatcgctcaagcggtatgttccggcagacatctgtttatgacaaaaaagccggtatgacctggggatcataccggcttttcttaattctcaagttcttcaatcatcagtgacagttcagtccagcgttccatcgccgcttcaagctcttcagccgtttttgcctgttcggccatcagttcttgaatctttccgaaatcacttcccgcttcggcgatttccgcttccagacgctgatgcttctcttcaagaccggcgattttgtcttcgatgccgtcccattcgatctgatccttatacgaaagctttttgcgctttttcttcggctcttcctccgcctttttctcttcagccggctgttttaccgacgttttctttgcttttgcatattccatgtattcgctgtacgaaccttggaaacgggaaatgacgccttgcccttcaaatacgatcaggcggtcaacgactcggtcaaggaaatagcggtcatgggataccgtgatgacgacgcccggaaactgttcgatataatcttcgagcacgcttaatgtttctgtgtccagatcattggtcggctcgtctaaaaacagcacattcggctcctgcatcagtacattcagcaagtacagacggcgcttttccccgcccgacagctttctgatatacgtctgctgcatcgggcgcgggaacagaaagcgctcaagcatttgttccgcggtgatgacatcgccctccgccgttttgacgatttcagccgtctcttttatatattcaatgactttcatatcaccgttcatttcactgtgatcctgggtgtagtagccgatccggaccgtctgcccgatggtgatattgccgctgtcaggctgaactcggccggcgaggctgtttaatagtgttgttttcccgattccgttcggcccgatgatgccgattctttcccccgggatgacaagctcgttaaattggctgatcagcgcttggccgttataagtaatggtgacgttttccgcttcgatcacctgttttccgagacggtgggagccgatcgcgaaatcgagcgatccggagactgccggccctttttgctccttgagcgcctctgctctgtccactctcgctttttgttttgtcgagcgcgctttcgcccctcttctgagccatgccaattcgcggcgcagaagattttgacgttttgtttctttctgctctgccagtgcttcccgttcggcccgcttttccagaaatacttcatagtttcccttatacgtataaaggctgcctctctcaagctcgtaaattctgttcgtcaccctgttcagaaaatatctgtcgtgcgtgacaagcatgacggcgcccggatattgcgataagtagccttccagccattcaatcgtttcattgtccaaatggtttgtcggttcatccaaaatgagcaggtcagccggctggatgacgtttttcgcaatcgcgacgcgctttttctggccgccggacagctcgctgacatccttcattaaatcggtaacgccaagttttgtcaaaaccgttttggctaacgtattcgcttcccatgcatcattcgcgtccattctggcctgcgcatcaagcaggtgcttctggcgctgttcattttcaggctcttcattcagcgcctgaagcgctttttcatactctctcatcgttctcatgactgccgagtcgccggaataaatatgttcaagcacggtttgtccggcaggaagctcggggtcctgatgcaaaaattcaatatgcacgcttcctgacgccgtaatctcgccttcttccgttgattcaaggccggcaatggttttcagaagcgttgacttgcccgttccgttcgggccgattaaaccgattctttcattctcttcaatatgaaaggagatatggtcgaataatgtcttatctccgtatgttttataaaggttttccgcttttatgatgctcatggttcctatcaatcctcacgtaagttcatgtgttcattttaaatcaggcgctggaataaaactagtaaaagggcagacaaatttcttggaagagatcattttgtccgaagaatgtttccgcctctccttttatacactggaggtgaagaggtgatgacatgatcagcgtcagtttgtgcgttattgtaaaaaatgaagaggaagtgcttgcgggctgtcttgattccgtcaaagacattgcggatgaaatggtgattgttgatacgggctcaaccgaccggacgaaagaaatcgcggcccgttatacggataagatttatgattttgaatgggtcgatcactttgcagccgcccggaattttgcgttttccaaagcggaaatggattatattctgtggctggacgccgacgatatttttttggaaaaggaccgcgaaaaactgcttgaactgaaggcgtcactttcaaaagaagttgacgcggtatccatgtattatcacgtcggctttgatgatcggggagaggtcagcttcagataccggcgcaaccgtctcgtcaagcgggaaaaagggtttcactggatcggagccgtgcatgaatatctggaagtatacggaaacatcatagaaaccgagatcgccgtcacacaccgcaaatccgagaagcagcattcgcctccctcagaccgcaacttgaggatttacgagaaaatggcggaaaacaatgaaacgatgacaccccgcgatttattttactttgcgaatgaattaaaagatcacggccagtatcagcgcgccattacgtattatcaccattttctttccacaaaacagtgctggatcgaagatgagatcagaacatgccaatacttatccgattgctacagggcggtcggccatgaagaggcagccatgacgtctcttttaaaatcatttttgatcgattgcccgcggccggagttctgctgcaggctgggtgacttttttgctgagaaacggcaataccggcagggcgtgttttggtatgagctcgccctatccgccaaaagcagcgatgcaggctttacccagctcgagttctccacctggtatccccatctgcagctctgcgtctgctactggcagctcggcgacagagaaaaagcgaagattcataacgacaaagccgcctcctaccacccgtcacatccgagcgtactgtataatcaaaacgtgctcggcacataacatcaaaaaaagagctgccccgtatgaagggcagctccttattgattacgctgtcggaattcctccgcttacactataaatttgggatgtcacatagctggattcctctgaggccaaaaagacataaatccccgcaagctccgccggctggccggcacgatttaatggaacggccggtgtttccttgccgaatttcggaatgttttcaccgcgctgtcctcccgaaatctgcagcggcgtccagatcggccccggcgctaccgagttgactctgattcctttattcgccagctgctttcctaagccgacggtaaaaccgataatagcatgtttcgtcgcggcataatccaatagcatcgggcttggattatacccttctacggacgttgtcgtgataatagacgcgccttttggcaaatacggaagcgccgccttgacgagccaatacagtgaaaatacattgacttcgaaggtttgatagatttgttctgtggcaagatcgctgatatcatccactgcctgctgtttgccggcgacaagagcgagcgtgtcaagaccgccaagctcttgatacgctttttccgccaattctccgcaaaacgcttcatcgcttaaatcacccggcagcagaacggcttttcttccttctttttcaattaatgcttttacttcttcggcatccggctgttcctcaggcagatagttaatggctacatccgccccttcccgggcataggcgattgcggcagcccggccgattcccgaatcgcctccggtaacaagggcttttcttcccttcagctttcctgctcctttgtagcttgtttcaccgcagtccggcacaggcttcatctctttctgcaaaccgggcggttcctgatattgttttggaaattcatcatggtcatatttcgtctgcgggttgtgcagatttgcatcagacatacaaaactctcctttatcattggtgatgtattcgtatgtgtacccttgagcatgacgggtcaaacgtgtgaggagcagtttccgaatgctaagataaaacaaaaaaaggagcccgtaagctcccccccttttttatgaatctccgagcacgttttcagccattttcgctaaatgctgggcgcttcccgaaatttcctgcatcgttgcagaaatttgttcaaccgccgccgcttggccgtctgtgttctggttgatggattcaatagaatcctccagccctttcagcaggctgtggatttttttcgtaatctggtcaatttggccgacattgtcttttgaatgagtggcaagcttgcggatttcgtccgccacaacggaaaagcccttgccggattctccggctctcgcggcttcaatagccgcatttaaaccgagcagattgctttgatctgagatgcccttgactgtgacggagatgtctgcgatttctcccgcgctttcactgacttgtttcgcctgagcggaaatcccggacatctgtgacgaaaagccgttgatggattctgaaatatccgcgaccgctgaagccgtctgttccacgacggcggacaggctttcagcgacatcatgaagcttggctgatttttcaaggctggtgccgagaccgacgccgccgataacttttccgttttcatcgtgaagcggaatcgctctggcaatcagcggaaatccgaacagctctttcggcaccatgcttgtcttcttctgattcatgcggatcgcgtctgtaatgatatcccctttttgcagcgggtcgcccggctttacgttaagagaaaaagttttagccggaatgttcacgattaatttttccgtatcataaatcccgatggtgatgtcatcttggatcagactgtttaaaaaaggcgcaactttgacaaaagcgtcaagcaggctgtgcgtttgctgctccgtctgtatactcatttctttcactccttcttaatatgggaattgccgtttttcatgctgaaccgaaatccatttcagcgtggtgaattcttcaaggctccattcgccgttcagcctgccgagacctgattgcttctcgccgccgaacgcgacattcggttcatcattaatggtcgtatcattgacgtgaatcatgccggtctcgatccgctttgcaaactcaacgccccgctcaacgtttgccgtatgcacggctccgcttaaaccgaacggtgtcgcgtttgcgatgctgacagcttcatcctccgtttcaaacggcatgatgcagacggccgggccgaacagttcctccttcgcgatgctcatatcaggcttcacatcttttaagatgacaggttcagcgatcgttccgctgaatcggccggacaagaccggaaccgctccctcttctatcgccttttcaacagaccgttttaaaccttccgcctgtctctcattgattaaaggcccgataaccgtatcagggtccatcggatcgccgactttcagcgatgacactttcgcttcgtaaagctctgtaaatttgtcatatacagacgtgtgaacgagcacgcggttcgccgacatgcagatctggccctgatgcgtaaaccggctgaatacggccgcattgacggcgtattcgagatcagcatcctcaagcacgatcagagcgctgtttccgccaagctccaacagcggttttttaaagtgtttaaccgcaagctgtccgatatagctgcctacccctgttgaacctgtaaatgagataattcgcggcacgggatgctcgacaaagctgtcgccgatctccccgatatccgtaacgatgacgttcagcagcccgtccggtacgccggccgcttcaaaaattttcgcgataagcgtgccgccgcagatcggtgtttcttcatgaggcttcaatacaacgccgttccccgcgccgagtgccggcgcaacagatttcattgaaaggaaaaacgggaaattaaacgggctgatcaccccgacgactccggcgggtattctgtacagcctgttttcttttccgtcaatcgtcgacgggagaattttcccttccatccgcaccggaaatgttgcggcttcttttatcatatttttaacaagtccgatttcaaactcagccttcagtcttgttccgccaagttcctccatgattaagtaaacaatcgcttcttcatgctcttcgatgaaagataccgctttttccaaaatggcccgctttttaaaagggtttactttgtcccattcttgtttcgcaagagccgcggcacggtacgccgcatccacatcatcaggcgtcgcttttcggaatgaggtgatgactttctgagtataaggatttctgtcttccaatacgttccggctgcttccatccctccatcggccgccgataaactgcttatttagttcttcatattgaaacatgtaaacatctccctttcaccgaaacttgaaaatagttaatgggtcattttttgtatcggtcttaacgtgagaaaattgaactatttcacgataaaattactttctcttcctcacatcgacgcttttgagctttgtccttttaaagtggaaaattctttaattgactgcgcgaaatttcaacaatataatacaaacgtcagtgtatataatgatgagaatattatgaattttcaggaggacccatatgtctttactatttcggaaaaagccgctggccgacttaaaggcacagagcagacagaccagtctggcccgctcgttaagcgcttttgacttggttttactcggaatcggctgtgttgtcggcacggggatttttgtgattaccgggaccgtggccgcgacaggcgcagggccggctttgattctttcgtttgtgctcgcggggcttgcctgcgcgctcgccgcgttttgttatgcggaattttcttcatccattccgatttcaggcagcgtatatacgtactcatatgtcaccctcggggaatgtctcgcgtttttaatcggatgggacttaatgcttgagtatgtcatcgcgctcgccgccgtcgcaaccggctggtcatcgtatttccagtcgcttctcgcaggcttcgggctgcatcttccggaggcgctgaccgccgcacccggaagcaaagcgggcgccgtgtttaatctgccggccgttatcattattttggtcattaccgcaattgtttcaaggggcgtgaaagaaagcacccgctttaacaatgtcattgtattgatgaaaattgcgatcattctgctgtttatcatcgtcggtttcggctacgtgaaaccggaaaactggtcgccgtttatgccgttcggaatgaaaggcgtcatcgcgagcgccgcgaccgttttcttcgcgtatctcggatttgatgccgtgtcaaacgcgtcagaagaagtgaaaaatccgcagaaatcaatgccgatcggaatcatcggcgcgctcgccatctgcaccatcctttacattacggtgtcgctcgttctgacaggaatgcttccgtacaccaaattaaatgtcggagatccggtatcctttgcgctccaatttgtcggccagaacaaaatagcgggcattatctccgtcggcgcgattatcgggattacaacggtaatgctcgctctgctttacgctcaggtgcgccttacatttgcgatgagcagagacggccttttgccccgcatgttttccaaggttcacccgcgctttaaaacaccgtttcaaaacacttgggtgacgggaattgtcgctgccgggatcgcgggttttattgatttgggaaccttggcgcaccttgtcaatatgggcactttggcggcctttacggtcatcgcgatcgccgtcatcgttttaagaaagaaacatccggagatcacatcttccttccgtgttcctttcgtgccttttgtgccgatcatcagcgcatgcttatgcctttatctcgcatgcagcctgccgggcgtgacgtggctctcctttgtcatctggatcgccgccgggatcgtcgtttacatggtgtattcgagaaaacacagtttgttaaacaaataaaaagggaggctcttttttcggtttgagaaagaagagccttttttgctcttgataattcattcaccttatgaataatatggtgtatgcttcgcttacagaaaaaggaggagaataactgtggcaattgccgccccgctgaaagaaaaacctgtccaacgtcccgagacaaccatgtattccattttattgattatcgggatctgtcatttgctgaacgattcgctgcaagcggtgattcctgcgatgtttcctattttggaacgttccatgagccttacctttacgcagctcggaatcatcgcctttacgctgaatatggtgtcatccgtgatgcagcccgtcatcggctggtatacggataaacgcccgatgccgtatgctttgccgctcggactcacctcaagcatgctcggcattttaggcctcgcgttcgccccgtcttttctgacgattttatgctgtgtattctttatcggccttggctccgccgtctttcatcctgaagggtcgcgtgtcgcttacatggcggcaggcaataaacgcggcttggcgcaatcgatttaccaggtcggcggaaataccggccaggcgatggcgccattgattaccgcgctgattctcgttccgctcggtcaattcggttctgtctggtttacgcttgtcgccgcaatcgctgtgctgtttctcatttatatcgccaaatggtacaaagaccgcctgattcatttgcgcgccgcaagtaaaaaatcgccggccgccgctgtacagaccgtgattacaaaaccgattattcttgcccttatcatgattatcttcttaattttcgcacgctcctggtatgtgagtgcaatcggcaacttttatacgttctatgcgatgaatgcttatcatgtcagcattcagcaggcacagagctacatcttcgtctttttatttttcggcgctgtgggaacgtttctcggcggaccgcttgcagaccgtttcggaaagcggaacgtcatcatcgtttcgatgatggcatcggctcccttgacgattttccttccgtttgcgggccctgtcatcgcttatggcgtactggccctgatcggcgttgtcctgatgtccagcttctccgtaacggttgtctacgcgcaggagcttgttccggggaaaatcggcacgatgtcagggctgacggtcggactcgccttcggaatgggagcgatcggagccgttgcgctcggcgccctcattgattcggcgggattaacgccgaccatgacagccgtcgcctttctgcccgttttaggcctgctcgcctttgtcctgccgagcgacaaaaccttaaaagaatggcactcataaaaaaatccctgccaaaaaggcagggatttttatgtttcaaccgtataaaaatgagtgtcaggaaccgcatatctcggaataaacccgtctctgaaatctgggaacgcttgttgaatttcatcaatccattttttaatatttttgatatacggcacgtaaatatagctgactgtcgccttgtcatcgatgtgatagtaccagcacagattgaattcgttctccgtgacgagtgtaaaaccggaaaaatgataaaaaatcagcggggtgtcattgacatatacagctccgtcgcgcaggctgactttatatttctcaatattccacagcgccgcattcgcgccgatcgactccgagacatggacgtgttcaaattgcgcgggccacttttcaacatacctttgatcaccgtatgtctttttttcttcattcatctccacggtacaataagagatacaatcctgtctccattgccagaccgcccggtacgcttcctcagtattccgcgcgccgacaaacccggtgttgtactgcccggtcagcttgtaataggacgcaaaccgttttgaattgcggtgatccgtcagaaaaagagaagcatccggcttttccgcaaacagcctatccacatctgagaagaaaaagagatcggtatccaaatgggcaaaatattcggcttccttatactccgtcatcacatggaacagaaatgccggcttcagcgtccagcaatattcatgaaacgtccggccgccctttgcttcaagcagctccggatcctccatttcatggagctgaaccgccgtgacatgctcccacggcacctgctgaagcagttcatacgccttcaggtcgacacacagcacatacagatgaaaatcacggcaatgctcatggagagaatgaatcatcggcatcagtttaaagatatgcgttcttgaaacaatggttgaaaaatgatatttactcaccatatcacatccagtttatttaagatccacatgcagtaaatcagcaatcagcgctttgaacgccctggcaaagtgcgtgacgcccagctttttttccgcttttgacaaaagcttttggacctccggcagatgaaagctgttcgccgtgatacgcgggcttttcgtcttccagtccgggtcgaggttgcggtctttaaccacgtgcagcagctcgagaaagatgtgcagcaggctttcatatttctcataatcaagcagtttttcgatgtctgccataatgctgttggtcaactccgcatcaaatgggccgttaaacgcgaggtgcacgtcaagcgaatgaatatcattgtacttgtcgcacatgtacgcgatattcgtcctgatgtcatcaacggaagcgcagttgctcggatgctcctgatggacgctcatgatatcgcgccgcagctgaaacgccaatcccgactgatgaagcctgatgccgagatcataatcctcaaagccgtatctgacaatgccttcatcaaacaggccgagatcttccacgtgctgtcttttcactgatgaattgttcgtaatgaaaaaacgccacggcagacggtagcctttcaaatcgtccccgtattttcccaaaatacttttcagcgcgcggataaaatcggtatctaagtcaaagcattggtcaagaaagcttccgtctctgatcgcactttcatcaagaagcggctctttatctcccggcagatcttcatacagttcggctagcttttccttatgctctttttcaaagcggtcataataaaagctgtacagccgcttccagaacataccgcaaacgacaagatcgtcccggttctcatgagccttgatatgcttagccaccaaatccttttcggcaagcatgtcactgtcatggaaaatcaaaatatcgcctctggcattgcgaaccgcctgattccgtccgtaagcgatccctctgttttctttaattctcacaaaaatcagcggaaaattcgcgctgaatgattcaagcatggataaggttccgtcttctgaaccgttgtcagccacaattacttcgaacggctctgtgcattcctgttcattcagggagagcaggctgttatacagcctctccttggaattatatgcgggaacaatgacgcttgccttcactttttgttcacttcctgtatatgatcatttatttgttatcatcctcagatgcaaagccgctgaactccgggcagacggcgctgaccgtcccgatcacctgcttcagaatgtcctggtaaagctgatggacaaacggcaggtcggtccgggtcgtctcgtgaatctgccgaatgtcgttggctgtgacgatccgatatccgctgaaatgatagaaaatcagcggacttccgtcttcgagcacaaggcgcccgtccttccatgaaaacgtatgccgtccgtaattccaatggccgatattcacgccgggcgtggcaatgtcacacacattcgggaacagatcagacatgtaatccaaatagccctgatctccgaattttccttcccccggcgcatttttgcattcttccaggcaacgttctttccaccacttgagacaatctgtgccggcccggtcggctttgaagctgagaaaaccggaattataccggcctaaaagacgctgcagcatgtcaatttcctgtttttcaaatgaggggatgacgatatcgccccgtgacagaagcaccgaacaatccggctgattttcaaaaatcgggcgcggatcagcgaagaaaaacaaatcggcatcaatgtacgtgacacgctctaagtccggatgtccgtccagtacgaattcgagaaataccggcttcaccgtccagcagtattcgctctgatccctcgtccgcttcagttcaaggagctcctcattttccagtgccgacacctgaatcaaggtgacattatccggccgcattgcttgaagcacgtcataggtgtcttgatccatgcacaaagtaaaaatgggggcgtccgcctgaacctctttcaatgagccgaataaagcgatggcctgatatagccttccttttgataaaactgtgcaatatgcgcttgtcacgtctttatctcacctctgtttttgttacttttgaaaaaaggctttataccattcaatcgttttttccaatccttcatcaatggcatgcgcgggtgtccagttcagaagcttcctcgccttttcagccgataaatattgatgcttgatttcgtggcttccctggttgagcaccttcggcttcagatcactgtccatggccttaagaattttttctaccagttccagcaccgtcagctgaatctcattgctgaagttgaacgcttctcccgcaagattgagctcctccatcttttccgccagcaaaaggtatgcttcgaccgcatcctcgatataaaaataatcacggataaatgtgccgtcgctgcggatttccggcgcttcaccgttcagcacgagctgaatcgtctgcggaatgatccggttgaaattcaaatccccgccgccgtacaaattgccgcagcgcgtaatacagactggaaggccgtacgtattaaaatatgtgtggcttaacagatcggcacagctttttgacacgtcatacggatgtttgccttgaagaggcatgttttcatcgtacggcagtgtcggctggtcgccgtatgctttatcactggaagcgacgatcacacgcttgataagcggatgtctgcggcacgcttcaaggatgttccatgtgccgagaatattggcttcaaaagtggaaatcggattgcggtttgcgacaccgacgatcgcctgagcggctaaatgaaagaccgtgtcaatttcatattcgccaagcgcccgctcaatcacatccagatcttcaagcgcgccctgcacgatattcatttgcttcacttgttctccctgatacagatttgatttgggcacagtgtcacggacaagtcctgtcacattggccccctgatcgatcagttccttcaccaagcagcttcctaaaagacctgtacatcccgtcacaaacacatttttatttttccagaaactcaaacctgatcaccataccttccatacatgttgtccttgatcccacatcttgttgatttccagcaggtttttatacgtatcgatcgccgtccagaatccgtaatgccggtatacagctaattcgccggccttcgccagctccttcagcggttcttcttcaaacatgacatccctgtctttcggcagataatcgaataccttcgggctgagcacgaagaatccgccgttgatgatgccgtcgcttgaggttttttcagaaaagcttttcgccatgccgtcttcgactctcagcgtcccgaattgcgaggtcttctcaataccggtgacggttgccgcagccccttttgattgatgatagctgatcagatgaaacatgttgatgttggccagtccgtccccgtacgtcattagaaaggtttcatccccgatgatgtcctttgcctgtaaaagccgccccgccgtctgcgtgtgttcccccgtgtctaaaaaagtaattttccacggctcggattttcccaatatccgcacttctccggtagagctgtccagcgtcatgctgtgattcttccaatcataatctaagaaatattccttaatcatctctcctttgaaaccaagaagcaggataaattcgttcacgccatagtattgatagagtttcataatatgccatagaatcggttttccgccaatcatggcgagcggtttaggacgttcattggtgatttcgctcattctcgttcctttcccgccgcagagaatgactgctttcatctctacccctcttctctgtgaatattggattcgaaaccgcccgtacaagagaaacccaacccgataatttgtccgattctctattaccggtttcaaaatctactgtaagatatgagagattggcgccctttgtgaccaaaagctctcccttttttcagattagtgaagatacacacaaaaaaaagaaccttacggaagatattccgcaaggttctttctattatttattatcctgattgagcttttctttgccgtaatgatattttgacggatcaaccggcgtaaagtcgttcattttgtggaatctgagcaggtctttgtacataacgctgtcagacagcttcagctgctctgtgactctggctttcaggtttttcgtttcctgattgcctttcagttcttttcctgtcttcgtatcgtatacgacattggaaatagaagtatatttcggcgtgacgtaatctccgttacggaacgtcaccgtgtcatcatggtctttcgagaagagatcggtaccgaaattaatatatttcttagaatcgatgccttctaagtgaaggatcgtcggcattacatccatttcaccgccgtacgtatggttcactccgccttttttgccagggacgtgaatcataagcggcacacgctggttctgcgcgttttgataaggcgtaatttctttgccgagaatttctttcatcgcgcggttatggttttcagagattccgtagtggtctccgtaaatcataatcaccgagttgtcatataaaccggacgatttcaggtctttaaagaactgttcaagcgcttcgtcgagataacgtgcggtctggaaatagtcatccacagtcgcgtctcccgttttcgctttttcgatcgttgcgtctttttcatcaagcgtaaacggataatggttcgtcagcgtgattaaatgcgcatagaacggctgtttcagcgattgaagcttcggaatggattctttaaagaatggtttatccttcagtcccatattgacaaggttgtcgtcagacatatcgtatgtgctggcgtcaaagaatttgtcatagccgatatgtttgtaaatctggtcacggttccagaatgatttgtagtcaccatgtaaaacggcgcttgtatagccttcactttggtcaaggatggcaggtagcgattgatacgtgttttctccttttgtcacgaaggctgacccttcaggcagtccgaacaggctgttatccatcatcagctctgcgtcagatgttttaccttggcctgtttggtggaaaaagttatcaaagtacgtcatgtcttctccgccgcgggcgagtttattcaggaacggcgtgacttctttaccgtcaagtttgtaattgatcaaaaacgattggaaactctccaagtgaatcttaatgatgtttttgcctttagccttgccgaaatactcggcgtccggcttcgcgtaatgcgacgatgtgtagttttcaacgctcgtcaggtcatcgctgcttgcatatgcccgctgcgtttccgtctgtgccgtctgcacgccgtcataaatcgtgtaattataaaggcctaagtatttcacaatgtagttgcggtcgaatgttcttgtcaacagctccgggcggtcctcttcggcaatcgccaagttaatgaagaacaaaacgatacccgtaacgataattaatgacgtataacgttttttcagcttgaattccttcagctcacgtctccacaccagcagtgcgattaaaataataatgtcaacaaagtataaaatatcatggccggacataatgctgaagatgccgtctcccatatttccgacattaccggattgctttaagttagggaatgtcaagaaatcatcgaagaatcgatagaataggatatttgcatacaaaataaacgtcatgatgaaatcaataatcaccataataatcgctgatttgcggcctttcgcaaacaatgccagtcctaaaaagaaaatggcgcttgagaacggattgatcacaagcagaaactgctgtgtcggccccttcaccccaaggttgaattcagcatgataggctaaatacgttttggcccaaaacaaaataatagccagtacaaaaaaactaagtctgtaagaaaataatttcttcatggcaacctctactttcctaaacactttaaatctgtattcttactttttgcttcaattcctgctttccgagcaaaacgaaagcatcacacagccccataaacacaccatttttaaaaacgatatatttatcattcgtgtcatgcccattgaacatcttatcccgccagccattagacgcaggatatccgttcttcgtttcacatttttttctgacattaaaaggataccgtatcaaaccgggtctccaaaatatgagataccaaatataagaataacacaaacttgtaaaaacgaaaaatgaatatcaaagacagccgcccaccaggcgggctgaagttattgtatgcaaagggtttgaaaaacttgaaggtttttttcggctgatgcaaaaaaaggactggagtgatccagtccccatatgcgtaatttttaaattcccgcccagacatcttttgcataaatgccttttgtctggagatccaaaagccactcttgtgcttgccgttcatctgttccgtgagccgactgatatgctttttgcagcgtttcctctacatcaggcgccatcttgcttccgtcgccgcatacgtatagatgccctcccctgtcaaggatcgaaattaaagtttcggcatcttccgccattaagtgctgcacatacgttttcggtacgccttctttgcgggagaaagccgtatgaagcgtcacgattccgtctttttcataagcttcaagctcgtcacggtaaataaaatcataatcgtttctgcatccgaagtagagatgggcctcccccagctcttttccttctccttttaatgccgcccgcgcctgcaaaaatccgcggaacggggcgactcctgtgcccggaccgaccataataatcggtttttccggatcttccggaagccggaattttgtttccggcgtgcggacaaacatcacgataccatcgtcaggactgcgatccgccaaatagttcgaagcgactccgcgatactcccccaaaccgctgcgggcggggccgcgaacgacgccgacggtaattgaagcctgcccgggatgtttcagcggcgagcttgaaatcgaataataacgcggtttcagcggacgcaaaagctccaaaaatcgttcaaacggaagctcacacgcttcatatttttcaaggagatcgagcattgagacgcgcaatgtcaggatttgctcctgatagacaccctcctcaagaagaccttccaattcatgtttgtgcggcgggcagacagtataagcggccatttcacggatttgagctcttgatgccgcttcctgcaattcgacgcagctgctcagaagatcgtgcagcctgaccggccgatcgagcgggagatgagccgcgctctgtccgctggccgtcagcagcacttggtcgttgccgttcagattgtaccggcggagaacacggctgacctgctctttgctgtttacaggcagaacgccgagatgatccccttcattgtaagcagcctccttcggcagaatgatttcaatatgccttgtgcttctatcgctttccggcgcttggagctccctgttttccgcaacggatgcgtaaaccgcttcatacgtctgagccaagggagagccgccaagcccgctcacaaattgaaggcccagcgtactccgctctttttcggcattttcattcagcttgagaccgaacgctttcatggcgtccttccacatactttttttccattcatcaagctttccttcaaaatcgccgctgacatcaccttcacctcgtgaggaaaagcgttccgcccctttttcagcaagcttttcatcaataagtctcggaacggcctgatatgtcgccgcccagttatgatcaccgcagccgaagacggcatatcggacgccttccaattccccttgtttgacttcttcaagccattgaacgaattgtccggcgttactcggaggctttccgttataagaggacgtaatgatcaagagagctccttctttcggcaattttccgatccggtcattcaaaggtgccgtttcagtccggacgccgtgcatcccggcagtatcggcaagctcccacgcaacgccttctgcggttcccgtatctgagccgtacagaatcagaagcggtcggttgtcaagcccgataatggaagcgccttttgtctcctgtttttcttttgttacgtcttccgccgctttttcagccgccgtgaaagccgccggaacggcttctttgctccgcggccgcacccggatatgaaagtcgttgggcttgagcgttaacgtctgtttaatatccagctcataatcggtatggtctgtaaaggtaaaatgctgaagaatcatccccagtacaagagtcgcttcatgcagcgcgaactgcatgccgatacacgcccgctgaccgtttccgaacggcttgtacgcatggtggggcacttgatcaggatgttcaaaccgctccggataaaattcctccgcattgtctccccacgcgtctttatcacgatgaagctgaggaattaagacggaaattctgtcttttgtcgtgatcggatatttcccgccgatcaccgtatcctctttcgcataaagactgaacgcaggcgcggtcggccataagcgcaatgactcctgcaaaatcatccggatataggtaagctccagcacttgtttatacgaaggaacgggatcggtcaatacccgatcagcttcctcataagctttttccaaaacgcggggatgcttcagcagaaagtagatggcaaaggaaagcaggccgcttgtcgtttcatggccggcaattaaaaacgtgatgatttgaaagcggatattttcatcatcaagtttttcacctgtttccgggtcttcaacattcagcatcctggccagcagatctttttcatcccggccgccgtctgacctgcgctctgcgataatactgtctaccaacgaaaacatcgcctgaatatcatgatgaaattggcgcttcgtcctgatcatgagcttatcctgaacatcaagacgctgcatttggtgcatcgcttcatcaagtgcgcgcaccatgctgttaataaacggatgaggcgtttctctgtaatagctgttaaaccgatagttaaaaccgcacagtccgatcgtatcgagcgtcagccgggtcatatcagcaggcacatcaacggcctcatcaggattcagccttgcccatttttgaatcagctgcaccgcgatatcagtcatcatcgaatgataatctttcatcgcgcgcttgctgaaggtcggcatcagaatattgtgcgcctttcgccagttaggctcgtgcgtccagcttgtaaacagcccgtcaccggaaaacgcgcggactttttccaaagccccttcaatacttttatcaaaccgctcttcgtcacaaacctctttcaccagttcatggccggacacgacgataatggtgcccgccggtgtatgcagctgaaaaatgggcccctgctctttggccagtttgataagcgacattgtgggcttgtctttatcaagcaaagggagattgccgagcggcccgaacgtcttcggcttcggaatcggacttgtttccttcatttacaacaccctttcttaaacgttgatgcgttccttccaactacagtgcccttttcaccggccgattatccgccaggacggatcaatcctctgattgacgatcgattacggttttttctatactggagaggcttgtcaaatacagaaataaggtgagttcacatatggattttgaaatcaagtttttatcgttttatgtcattcaagtggaaggaaaagacgatcaggcaaacaaacagttcaaacatttccagacgcttgatacggaagaatttgaagaaagcgagctgaaggattttcttgacggggaattgaagaaaatcgtcaaacggaaagccgaacggcacccgcaatcagagcaggtccccacaaaaatcggccattttatcacggagccgggtcatgagcttgattcaaatccgaattacaaccttttcaaccgcgcccggcttgcggatacgaaggaagcatttatagaagcaagtgagcagttcgtccgcacgtacctcgatacaagcgccgttcgcggcggtgttttcattgtggcatcggccgtgccccgcaaatattttgaggacaaattcgtctttatgatgaaatgcgatttcgagccgaaggtcgcccgcatctcagacgccgcgtctctcattaaaaaagtcgaaatggccatcacgacaaagaatatgaaaagcattcaatatccttatatgccggaagaaggcatgaccgaagagcacgagctgaaaatccatcaggcctcgcacgcccgttatttcgaggattttctcaaatttgtcgaatacggcgaatcgatgccggaaatcatgaaaaaccaagtcataaacatggtgcaggaacacgtgtatgaaacctttgaagaaaacagtgaagagcttcagcagtttgagcacgacatcgaaatttgggaagcgagtgaaaagcgggaaattcaggagcgcctcgacacccatcaagtcatcgaggcatccgcgcagatcattgagcatacgcctgaggccgagctgaaaatgaaagtcggagaaacagagattaaaggactgctggccgatttcggcgaatccatccatctcgcgaaagtgaacggacgctatgtcgcgctcattgaagcagaaacgatttcgtttgaaaaaggcagttcaccggtggagtttcacaagcctgaggggctgcatgaggtgattgagcggatccggaataaatctgaacaagactgacaaaagtccagacgccatgttctggactttctttatttaataaggctctttgagcagccgatggcattcaccgatgatgtcttggacaccgggtgttccctttatctcgcggcggacgatttcagatgacagattctgtatctgtaaagcccgctccgcccgtctttcgaagtatgcttgaaatgcagtttcatggttttcatcattttgcagtcttcactaagaacgatcgcgtcttcaatcgccatcgccgctccctgcgccaatgtcggcgctcctgcatgaacggcatccccgcccagaacgacgcggcctctgtgccacggttctttgaccgccatctgctcaattttatgaaacaaaacaggatattcctttgacatattctctgtcacaaacttcactcccggaaatccgtgcagcaggtctttcacccgttcaaaacgtgtatcctcgtcatccgtacagtcagcgtcatacggccggatgataaatacgtatcctgttttttcggacagcggcacgacaccgacctgcgtctgcccctttttatacatcagtgtcgaatcatgaaaaacccgctcgggaaaagagatgaaaaatctgtgcgctcccatgccgagatactccgttttcacttctctttgcagcatttgatcacggacaacagagcggatgccgtcaaagccggcgagaatgtccgccgtcatcacggttccgtctgcgaaatgcaccgttatttcatccgccgtttcttcgtaagacacgacttttttccccagcaaaatcgtggcccccgccgcttcagcatgctttctgaggatatcatttaacgtttgccgcaatatattattcctccccggcaatgaatcatctaaaaacgcctctctcactttaaacaataacgacccgttttcatcatgctgcttcagccattccgtttgaaaaccgttttggcagcattcttcatacacaccgatttcacgcagcaccccgagcgcattttgaggctggagaatgcccgctccgcttttacgcatttcagaagccgcctcgcaaagggtcacttcaaaccccgctctcccgagagaaatcgctgcacacaggccgccgatcccaccgcccgctatgatgatctttttcacttcatggttcattacgataccgccttcttatttattatctattaactattagccaccttactatattggctgaaaaactgtcaatctttataggttgccttttgaatccggcaggcttatactttgaatcactaaaatggtacggaggcttacaaaaatggagttgagacatttgccggattactcgcagattgccggacacgctgagatttacgccgatatggatgctgaatcattgaaaacatttttgacgttattagatatgtcgaaaaaaatgaatcaggtcatggagcattatttctcaagtcatggactgtccgaaggcaaattcaaaattttgatgtttctgtttgacgcgcccggccacagcctgagtccgacggagctggcgaaagaatccaatgtcaccaaagcgaccattactggattgatcgacggacttgcccgggacggctttgtgaaccgcaggcggcataccggcgacagacgaaaaatcagcatcgacctgaccgaggaaggaaaagaaaagctgatgcggtttcttcccggtcatttctccaaaatttcaggtgccatggaaagcttcaccgcagaagaaaaagcggaattgacaaaaatgcttgaagttctatttgataagcttctgctgttttccggcggcagaacataaaaaggcgccccttttagagggcgccttttccgtgcgattaatcatcactgtttaaaattccgaaaaaccggagcaggttgataaacaggttgataaagtcgatataaagcgtcaatgccatcaaaggaatcaaatccgccgtgatgtcccggtgtttgatctggttcagatcgtataagatgtacattgaaaacacaatcgtgccgatgacggaatacgccatcatggcggcggaattcagcgggctgaaaatattaaagatccccaccgcgagaagcgcgataacagcgacaagcaagaaggaccataaaaacgacaagtcctttttcgtcttagcgccgatcgtgccgagcaccgcaaaaatcacaaatgaagagccgaatgcctccaatacgacataggcgcccgctgcggacgcataatggctgataatcggaaacagcgtcattcctgaaatgaaagcgaatgtaaagacaaacgcatatccgacggcttttttacggcgcagccaaaacgcggcgaagatcatgataacctctaagaccgacagcggaagcatcaatgccggcggaatgaactggccggtatacaggccgattgtcgcaactaacagcgtaaacacaaataccgttataatgcgctgcataatagattgtttgctctcataagcagcagtttgcatgtcaaaagtcctcccaaaaaatgatcgtgataggtctattataaataaaatgggagaaatttgcatgattttaagaagattttaaggatattcaagcctggcgttttgctgcgcactcctgcatatccatgaaatcatgcagttttttcgtcaatcccccgtgcccgaatcggatattccccttctgtcccggcgttttcgcaaaatcgagaaacgccagcacataaagacgcctgacgggaatgggaatgatgcccgcatcataaaaccagccgtcaattgtgttcagcactcctttgttaatgccgtattgcttcgtgcaccaatgcagaaagcgcacttcaggcaagtgcagataccggctctcccggaaagggacagttgaatgcttcatatgtaccgcctcctgtcatcggctgttttttaagattgctgtttagcttctttgctcttcagggaaaagcggtatttctccaccttatcaatttgtgttacttgggaattatgaaccgtaatctgaacagtcccgaaatcgatcgtttccagcgcactgataatcttttcaatcacatgcggatctacgcttcctttggacgtcatcatgctccccctttatgtctgcccgttcgtcttttgacaatggctttttaattcatactattctgataagaaatatacacttatactattatgttttctttcagaaatcaataacatttacacaatttttggatttgatttctccactcttttcctgcttaaaaaagaaaatcagttgactggcggccagctttcgtttgtgtacgatcagctatttgtgccggttcgatgtgctgcctaattaagtttttgaacatttaaatttcccgccataaaaaaaaagcgccccgcctctggccggagcacctttttctcacacttttgtttcctcaataatacatgtgacacccatgctggcgagcgcttgctccaggctgccgtatgtttgatactctgaaaaatcaagtcccaattggattgaagtctgtgccacatcaggccgaatgccggaaaatactgttctgatgccgaggagaaataacgttttcgacagcatgtacaattgctgcgccaccatcgtatcgacaatgggcacaccggacagatcaatcacaaggtttgtgatccgttttgcgacacagttttccggaactgtctccaaaatcacacgcgcccgttccgtatcaatcgcaccgatgagcggcaaggtgccgatcgtatccgcaatcaaaataaccggacagctcaattcggaaataagctcctgctgagatgacagcctcgaaatcattaatatctgatactgttcggtaaaatccgtcatcagctgatcaattgagccgttgacaaggtgattccagcggcgggcatcctcgcttgttacgatgtcctgatgctcatccataaaacgggtgaccgcttcccaaaagacggttcttgaattgccgatcgcctcaacgacctcatgaacctgagcgtcctgctccactctgcttttcgctacctgtgcggcccatttttctttgttctgctgaaaaacggccggatcttccagcaaagcgctggcgatggttgtgttcgtaaacgtatgctgctcgatcagcagttgtttcttttcttcacttaattgatcctcggaataaaaccgccctctcagcttccgtctcagcttgagccatttttccgtcagctcggccgaatgtgtaatgatataatcatgaagtaattggtctttgttcactgccgtctcctctttcaagatatgtacttttataaattataaatcggaaacgccgttcgtactagaggaattaaaaaaagccggcacattgaagcttttggttgcttttttcggttgcgggatacaatataaaaagaaatgaaacaggaggtcgtaaaatgattaaaaaaatcgcgacagtcgccgtatacactaatgatcagcaaaaagcgaaaacattttggacggaaaaagcggggtttgaaaccgtcgctgagcatccgatgggcccgaacgccttttggcttgaggtagcgcctaaaggagccggcactcatttggttatctatccgaaagcgatgatgaaaggagccgagcatatgaaggcttctatcgtatttgagtgcgaagatgtgtttgccgcatacgaacagatgaaaaagaacggcatcacctttttagatgaaccgaaacaaatggaatggggcaccttcgtgcaatttaaagatgaggatgggcatgtttttctcctcaaatcgtaatcaggtgtctcaattgactttgagaatcattttcatttaaaataaaacgtgaaaatgattggagagatgccagatgttcgtgcaaatcagaaaaatgaccgtaaaagaaggacatgccgacaaagtgatcgaacgattcagctcagaaggcgtgattgaaaagcaggaaggtttgatagacgtaacggttctggagaaaaaagtccgccgcggcgatgaagaagtcgtcgtgttaatccgctgggagtcagaagaccattggaagcaatgggaaaaaagcgaagaccacatcgcggcccacaaagcaaaccaaggcaagccgaaacccgattatatgcttgggacggatgtcggtatgtatcatgtcaaagccgttaaaacaggcgtgtacggaaaataataaagagcatttgccccagggcaaagctctttttattttttctcctcatatggaaggacgaacagcggtttatcatgcttccattccgcataaaatacatcctccgttcttttgatgttctgctttttcaggtcctgaatcagctgttcttctttcaccccggcttctttcagattttcatacagcacttcaccgtcaatgatcagtgtgaccggtaaagagacctgcttcggcttgatttgcatgtcgccgtttttcgtcgtgtcatacggaaatttcgggaggacgctgaccatcccgtttgtttctaaaatcgcgtattccgcttcctgtatggaaaagcaattcgcctgtctgagaaggctttgcagctgattaatatccagtttattctttttcagcacatcatatttcaattttcctttatggatgacaatattcggctcgccttccaacagctttctggagcttttcaccttctgcgtaatcagttcgatgaaataaattaaaattccccataacagagaagcaaaaatgatttcgacgatcctgacgcctttatcatacaccgcatttccgaccaattcgccaaggatgagcgcggaaataaaatcaaacggcgtaatctgtgagaattgagtttttcccagcaattttagaatcacaaataaaatacccaaaccgcatactaattcccaagccactgtaaataaatgtcccatatctgcaccttcttcttaaaagtcattaccattatggacattcgcctgttttctatacagcggctgacaaacacaaaaaaacgcagccgaggccgcgtttctctatttctgtttaatgtttttgattcgatctgacgaccctaacacacgcctcagcggcataaccggcggccgctccgaaaccggcaaacatcgcggccagacccagacccatcccttcccagccgccgacaccgatcatactgtaaacaaccgtaccaaatgcagcaaggccgatcaccgccaaaagacattcgggccacatttttttcggccatttcttacggagaaaagcagatatcccaaaattaagacaaaacgcggccagacagaacagataaaaataccacatgtcttttgcacctccatccgtgaggagctttttatttgctcatctctttttcaaacaaatgataacctgacgccaatccctttgattcatatcccatcccgctgtaaaacgactgaagcgccttgttttcggacacgcaatcgagccggattttcgtttttcccggacaagacacacccgtctccgcccatgccataatcgtccgtccgagcccggtgcctgcaaaccgcctgtcaatcgccagccggtgcaggtacatggactctccgtgaccctcatcgccccaaagacgtctgtcccactcgcttgcttcgggaagcagcatgacgacgccggccagctctgctttctgcctgaataaaaaaacatgtccttgggcgatcgcctcccgcatattgtgggtatcttccccctgtaaaaggccgctccactggcttgaccctttatcccgaagccattctgccgctgacacgagcagatccatgacctcttttgcatcatccttccgggcggggatgacccggaatgcccccgccgtctcctccgtgatcgtaaatggtgtcataaaagcctcctgtaatcagaatattcgacacctttattatagaccaagcgcaggacggaaaaaaacagccgtcatgtttgagggccgtttaaaaaatcttcttcttatcacgttcttcttttaaaatctcaaccgcttccctgaagcgcatggagtgaacgatttcacgctcacgcagaaaacggagtgaatcattcagatcagggtcatcggaaatatcaataatccattgatacgtcgctctcgccttttcttcagccgcaatatcttcatataaatcagcgatcggatcacccttcgcctgtatgtaagacgctgtgaacggaactccggccgcattgtgataaaacagcgcgctgtcatggttgacgtaatgatcgctgagccctgcatcacgcagctgctgcggggtcgcatcttttgtcagcttataaatcatcgtcgcaatcatttctaaatgcgcaaactcctccgtgccgatatccgtcaataggccgatcactttatcaggaatcgtgtagcgctggtttaaataccggagcgctgcggctaattcgccgtcagccccgccgtattgttcaatcaaaaacttagccagcatcgggttgcatgtgctcactttaaccggatattgcagctttttttcatatacccacatttacagatccctccttatacttgccatggccaaggaccgcggctccaatcccactgcgcgccgacctgactcacgccgaattgcagaagcggtccgtactcaggctcaaaccgctttctcagctgccttgagtaccgggaatattcatgaaactgctgaagcgcgaggcggtcgtgtggatgcgtatccagataaagcgtcagctccaccagcacaaagtccgccgcctggatttgctccagcagccgatagtattcatcatcaatctttttcgccatattcgattcccccccgataaggattatcatagaaatcgtaaagatccttccaaagggtcccttttttcaatgcctccatcggagaaaactgctccaagtgatacggctgaaaccgcatataaagatgcggcggcgttctgaagtattttctcccgatcggcgggcagggatcaaaccggctgtggaagggcttataagatttgaccggtgtaaacggctgattttctttcattacgatcctcctttcctaaacacatgaccttaataggtatgaatccgtatcagcttttatgctccgcaagaaataaaaaaagcccgttaaaaacggactcaaggtaacgctccggaatttgaagtgaaaaaatcacaatgaaaactctgattgaaaacgctgataatgtgtcaacgtatattccgtaatttgctgatcatattcaggatattcatatctcaataaaacagcgactgactttgaatatgctctaaagagaccctgacagtcaaacaatgccttccacacgctttcataagtattgccgacaaaagtattcagcaggatttcccaatcttccgcattcatgtatttttgaatatacttataattcttccctacacttaatgaaaactgattctctatcccgatcttccacgcaatcatacgcaaaacattaggccttagaatgtcattcatatgatccagcgcaaacagtatttctttacgcattaatcctttaatcacataggttgaaaccatccaaaattcattgcagcaatcatcaaactctctgggagtcggtttctttatatgatattgttcatcacttgcaataatcttgcgcttgatccggtcatccttgtctaataatatttccgccaaaccatcactctgtgtaaaataatgctctgtttgatttacagggatcaaagttaaatcgattttatgatgatctttaaaaagcattaagtaggagaaccagtctccgagttctggagggaaaagttccatatcttcaggtttttgcatcatcattctttcgccaaactgatccagccagctttcgtcagatgtgaaggagtccatatcggtcacaaaataagaaatatcatagtcttgaaatctgtctctcggtacatttttattggttcttgatccttccaaggtcacaagccggattcgctcgtccttcatcgcaatatcaagaatcaatttcatcatttcgttttcacttctcacatgtaaaatctcccgcataaagagagcctttagggatgctgtaaacggcagttaaaattcataaagaaaaagtttgtgagcttgcttataatttacagaaaagccctatgtactcgtgattttgctcaatcgtaacacagctgcaagaacatgagtagggcactcctgctgctcaagagtgcccttctcttatggtcagatatattggctgtcccgatgatgatgatggaacgggtagccgccgtagcctccgccatagccgccaaaaccgtaccccggatatcccccgaagcctccgtagccgccaaaaccgccgtaacccccgtaaccgccaaaaccgtaccccgggtagccgtagcctccgccgaaaccgtaccccggataacctccgaagcctccgtagccgccaaaaccgtaccccgggtagccgcctccgaagcctccatagcctccgccgtagcctccgccgtaaatcggtcttctttcattcatgatttatcgctccttcacataggttacagtccagcttatgacatcaggaacgaaacgtatgggcatccgcccatttttaacgaaataatcaaaaaacgctttacggaggaatccgatacagggcggccgcacaggcaaaataaaaagccggaacatgcacggtcccggccttttcgtctttattcgcctaaatctacattgtgataaacctgctgtacgtcttccaggtcttccagcacatcaatcagcttttcaaattgagctttcgcatcttccggaagctcgatttcattttgcgcaagcatcgtcagctccgcaactgtgaactcttcaacgccggcatttttgaatgcctcctgcacggcatggaattgatcaggctcggcatacacgataacactgtcatcctcttctaaaatatcgcgaacgtccacatcagcttccatcagcaattccagcgcttcatccgccgtcttgccttcaacaccgataacggcggtcgcatcaaacatgtaagcgacagacccgctcacacccatatttccgccgttttttccgaatgcggcgcgcacttcaggcgccgtgcggtttacattgttcgttaacgcatcaacaatgatcattgaaccgttcggcccgaaaccttcgtaacgcagctcgtcaaagttctcctccgcgccgcctttcgccttttcaatcgcacgctcaataatatttttcggcacactgtacgtcttcgcgcgctcaagcaccacttttaaagcctggttcgattccggatcaggctcgccctgttttgccgccacataaatctcacggccgaacttcgcgtaaatccggctcgtatttgcgtcctttgatgctttcttttctttaatattgttccacttacggcccattttgttccactctctttcacgaattgaatctgtatgataaatactctgtttctattatacctcagcggttgggttgtttcgagtgtaagactttagaaaaagcagggacgcttaaaatagccgcggcgcactaagccgaatctgagggttactgtacaaaacataaaaagcctcccttcatacaggaaggaagtcgcaagccaaaagattcattttattcttattacctatttcctacactgtatatcccgactcacgtggtaaaattttgatatcgaacaaaagaaaggatatggtcatgaaagttttcgaagcaaacagcctactggccgccgccaagcagcgtgcgagtgaatacaaagaactccgcggccaaatggtcaatctaaaaaaagccttccaaggcatggctgatctcggtgacggcgatttctctggccggggcgcaaataacattaaagcttttttcaaggaccacgccggcgtcacagacagctggcttgatctgatcgatatgaaaatcgcatttctcacaagccttcccggcaaagtcgaaaatgccgaactttccaattcgcatgtggaggaatcatttctggagcacgagcttacccacgccctcagaaaatcaaaggcgattatggaagagcagaaaaaagacatgcgctccatcctcggagagatcgaagacatcatttcgctcgaattgttttcaaccgagagcacagatcagaagctttcctcagctgacaaaaaaagaagcgaaaccatacataagctcggcaagctcgatcacgatctaacgaaagaatacgcagaaaccgaagcgaacgaacagttcatcaaagccgactttcagcagcttcaaaatgccacgggcaaaggaaaaagcgccacgccgcttcattacaacgccaaagcataccgagaaagcgacatccataagaaaaaaggcgagattgcaagacattcggatgcttatttgacgattaagaaggaagaagcgaaagagcggggagattgaaaaactgaaagaaagactgaaaaactatgattatgcgaatgccgatgaattctatgaaatggccaaaacgatcggctataaaaacctgacaaaaggacagcagcgctacttcactcaaattgaaaacacgcgtgaactcacagacggtttcaaaggcgttgccgtcggcctttatgattccggaaaagacgcggtcacaggcctgtgggatatggtcacagatccgggcggaaccgttaaagccattacaggagcggtggctcacccgatcaaaacgtatgaagccatttcagccgcaattgaagaatcgtaccaaaaagacatggtcaacggtgacacctactcaagagcaaggtgggtgtcatatgcggtgggcacagttgtgacatcagttgtcggcacaaaaggcgtcggcgccgtctcaaaaacaggcacagcagccaaagtgacgaccaaagtcaaagcagcagcaagcaaatcagcaacagctcaaaaagccataacggtctcaaaacaaaccgttgatcacatcaagcaaaaggtcaacacaggcattgaagtatcaaaaaagcgcgtcaaaaccaagttgaatcaaatcggagatctcactctagctgatattctcccgtatcatccgcgtcacgacttagtaccggcaggcgtcccttacaacgcagtcaacggggtcacacttaaagagggactgcaaaaattcgccaaggtcatcctcccgaaaccgtacggaacctccgcaagcggcagacggacaccggcaccgcatgtaccgccggtaacggtcaaatacggcgagcattttgcgaaatggaccagaaagaaagtattgaaaccgaatgtcatctacaaaacaaaagaaggctacacgtacaccactgacaactatggtagaattacaagtgtcaaagcagacttgcagctgggagaagcaaaacgcaaccaatatgcacagtcaaaagcaggtaaaccagaccgtctgacagatgacgacggaggccacctaatcgccactcaattcaaaggctcaggccaatttgacaacatcgtgccgatgaattctcagattaataggagcggcgggaaatggtataagttagaacaggcatggtcgcaagcgcttaaagaagagcctccaaaaaaggttacgatcacaattgaaaatgtgtatgagggtgattcgttaagacccactttatttgatataacatataaaattggagaagaaagaacaaagagcatcacaattagaaaccaaattggaggctgatgaaaatggaaacttcaaaaatggaacaactatatcaaaagattgctgaaaaaataaatgatatgattccctccgaatggatgagggttactttatatgccgaaattttggacgactccagagaagtttattttttctttaacacacaagaagacgaagaatatatttattcacacgatattccagaacattttcaagtaagtaatcgaatttacaaaaatatgctactagaccttcaagatttatttgatgaattaagggatgaatttaaaaagcaatcttcagatatttggactaacctcacactaaatttagatagaaacggtgaattctcaatcgattatgattatgaagatgtactcgcttcaaaatatactgatactgagcgacaagtaatttgggaatataagcacttgggaattacgccaataagcgagagcagcagaaagttccttgaacaatatctaaatgaacaatgaaaaaattggtgaactatatcaaaagattgctgaacatctaaatgaaatgattccatctcaatgggaaaagatcattttatatgctgaaatacttgaggactcagcggatatatacttttattttacaacaccaaataacagtgattatttattttctcattatatacctgaacactttgatgtgagtgaagagatttacgatcaactgctaattgaacttcaagagctatttgaagaactaaaagaagaatttaaactaggcaaccaagatatttggactaatctcactttaaaattagaaaacaccggaaagttttcaattgattataattatgatgatgttttatcctctgaacttgatgaccttcaaagacgagatgtttggaaatatcaaaatttagggatattgcctaaagatgagaacgataaagaatttgtaataaactacttcggtctataaatcaaaaaaatggctcagcccttctctgctgggctatttttgataactaggatttctcgatggctggaggtgaaagattggagactaaaaaaacgcaagatttgtaccagcttattagtcagaaattaaatgacatcataccttgtgaatggacaaaaatttacctttatgcagaagtattaaatgactctaccatggttcttttttacttcagaacaccagaaaataatcaaattatttattcacaagatatacttagccattacagcgtaagtaaaaatgtcttcaaaactttattaagggaaatccgtgaaatttttgaggaattaagagttgagcacaaaaataatattgatcaggtctggactaacttacattaacattggagagcaatggtcaattctaacttgattataatgatgacgatattttggcatttgagttagatggggatcaaagaattgcattaagggaataaaaacccttggaattttgcctgtagacgaggaagaagaggatttttaattacttatctaaatcaataataaagactggaggcatcatgaaactgcaaaaatgggtgaattatatcaacagatagctgaaggcattaacgaaaaaatcattccttctggatggtaaaaggtctttctttatgcggaaattctcgacgattcatctgaggttttcttttattttaataccccccaaagtgaggattatatctattttcaaaacattccagaacattttcatgtcaatgaggggctgttatttgacttacataacgtattcaagttttctttcaaaacaggcagcaccccataaacggatgctgcctgttaaatccttatgtatagtctgaagaggtcatttattttgttttttaaatatgaaaatagatatgacggtaaatatgatagctgtaataacaatgatccataagcttgcagccgtactgataaaatggccgtttaacttgtagacgatcccgtaatgcttttcatattcctgtatttggtccgcagaagcatgtttaaatactttatcaaccgagtccgtcataaacgcttttctgaacagaacagcggtgtggctgatagggaaatacataataatcttctgtacaaacaccggtacgccgccgatcggtacatatactccgcataaaaaaccgatggctgttccgacgatcgtacttaacgttgaaaatgcattttgtgtgtgaataaacagcgttaaaaataaattaatggagcttgacaaagcaactgaaagaatgatgatacccaatacttcaagtatatcagctccgcttaaaagcttgctgcctgttgaaacgagaaaaatttcacagcctaaaaaggcgatgaaggaaaagatcaagccgataacaaatgaatgaatgacgtagctcaattgaatggtcgctctggataaaggagctgttaaaaagtcatacgttctcttgctttctttatctttcaccataattccgaaagcgcctaaagtcgttgttacagctgtaatggacagcaatcccgccaccatccattcgttcaccatggctttggaatcatctgtcgaaccaaccagcgccttaatggcgtccagctgtgtctgctgcaagaacacggcatataacagaatgacgataaatactgacagcagagaaagaagcaaaagcgttcgatcacggaagtagatttttatgtttctgctgattaaactggataaagacttcatttacgcaatgctcccctttactggcaaagtgcttccttgttcttcgataatatggataaacacatcatccatattccctttgatcacctcgaaagattcgacttttccttcaagacttttcaaaatgtcaaacgcatggagagtggactctacacgaagagaataaatagagtttttaaccgtaaaggccagttgtttactttcaaaccatgccgtcggatcaacgtcttgcttaaacaaaatatgcagactgtcaaacgcatattgatctttcagctgactcggtgtgccctctgcaatcagccgtccttctttgatgaccacaacgttatcagccacagcggcctcttccatgtaatgggtcgttaaaaagatcgtcatgtttgtttcttcctgcagccttttaatcgcattccagacaaataccctcgtttgcgggtcaagacctgtcgtaggctcatctaaaaataatatggtcggtttatggatgatggcgcgggcaatatccgctcttcttctttgtccgcctgacaaatcgctgtattttttctccttaatatcatccaattttaaatagtctgatacaaactgatagttttcctgaacttgtgctttgcttaaatgataatattgtccgcgattcatgatattttcaaatacggtcaatcgttcatccaaaatactctcttgaaagacaaccccaatctttttgcggatatgattgttctctttcccctcaccaagcgtaaaaccgtcaattaccacttttccggatgtctttttgatcagtgtacagagaatgtcaatagtggttgatttccccgcaccgttcgttcccagaaatgcaaacagctcaccgcgtttgacagaaaaggatatccctttaactgcttcaaatgatccgtattttttgcgcagatccgttactgtaataatgtcttgttcttctcccattctgttcacctcgaaaagtaagattttatgccgttgaccactaactttatatcgactttgccgctaggatttttctcatttttatccaactttattatctttttataaataattatcttgattatgaaggtatacgcacataaaaaggcttcttaaaagaagcctttttatcgttttacgttaatattatgctttaattccccaagtcattaaccatcgccactttgttgagaagctttgtaaggatctcctgcacaaatagatttttctttttctgcaaaaacggtagaaattttagtcgcattcgttaaaaagcctttaacagttatcgcaaaatcttgcctccctgctctttttaaaggtataagatcatagcgtgatgtttttcccaattccgttttaataaataattaaaaaaggtttcattggtgcttatatgtggctttttcttcagcaactaatgaagacttaaagaactcattctctttgtaattcatttgcatatgtttcagccttttaaaaaagtaattttctaattgtttgtctatacaataaataaaacagcctttttgtccccgggtcatcaaagttctgtatgtgttgcgaataatttcgtctgcaagcttctcagcttcttctgaattttgctttagcattttcttcaaaccacgtaaggaggtatctgttttcgcccgctttgaatgatcagtcaatactactccatccctgcacactagatcatttcctataattacacctacataatcaaattccaaaccttggcatgtgtgtatacaacctatttcattaatagaatcttcgtcaattgcccacgtgtctgagttatttaaattccaactcattccgaattgatattcaggaatctctatatcatgaaattctgttttagcttttccttccttcacccaatcccaacagtaaccagcaactattcgagctttattattaactttattcagatcttctatctgtttacgcaattcatttggatttctatatatacgaaaatcgtagttcattccaatataattagaattcgcagtttcccgaatttgaagaacatcatctaaccagcttatataaccatctgaaccattgcaacgaaactgtgaatccagtttcatatttgtaacctgagcatctaattcttttgagaatttaaggattgtatcagtactgccaatatcttttaacgttactctttgatgttcatctatgaaaaaaacagaaagtttggaagcatttattatttccttaatttgattttccccaaggttattaaataaaccggatttctcatttaatcgatgcgcctcatcaacaattaaaacgtcaaattcacctgatggagcattgacataactgcccgatcctttaaataaattatcaatgtgccctttccgaaagttttgttttaacttagtagcatatacatttctgggagctgcattttttgttacatattgtgcaacgagacttcggtttgttgcttctactaataaatttacagcaagaacagattttcctgtacctggcccgccttctacaactaaaacttgtttagtgtttgtacgtaatgcctcattcgccaaatgtaaggccgtctcatacacaactttttgattatcaatcatcataaactctcgattaccttgaagcatactgtttaacgaatcttgaagagactttgaaggccgtattcttcctttatctattgtatataggatttctttgctgtctccatacttaatatactttttaatgaaatcacgaagcttacctgaatcacctttgataaaaaccggagcttcttttatataatattcatatattgaatcagttaatggatcgtctgtaccctgattcaaatagttatgtaagtatgtacaaggatataggttgatatcttctttttgcgcattttcattgtaatcctttattaacgatgcgtatgaccaggcttgataagatggatgggttgtttcgcgaattcctttatttataaacgttttaacgatggcctctttactatcaattttctctaccttctcccattgtttaagttccacaatcacaacagatgaacgatcattcttatctgatccagatataagaaaatcaatacgctttgaagtattgggtattttgaactcaatagcaattcctgcgtccttaggaatttctctatcacttaataccctatacatatactgcatagagttatcccaagatctaacctctctctcattgattttgccaattttatcattgtagtttttacaaatatttgttaccaacttatcgtcaaacacatcacttaaaaactcttcttttgtagcttcatagactatcattgtttcaccttttcattaactttttacgttatctctataattcgccactcaaaataactaaattgagttatattgagaataccatttttcttcaaattaatctgttttaatatgctctttgtaattaataattaaaaaggatccttcacatactaatataaaaaaagcagcgttctcaaaaagagaacactgctttatttcaattcgagctttgccacacactccacatgattcgtatgcgggaacatatccaccggctgcacttcgagggtctgatatccgccatcctcaagcacccgcaggtctcttgcaagcgtgccaggattacatgacacgtacaccacccgcttcggtttcatctcgatgatcgtccgcaggagggcttcgtcgcagccttttcttggcgggtcgacgacaagggtgtcggccgtgatgccttcttcgtaccactttggaatcacggtttctgcttctccgactgcgaattccgcgtttgtgataccgttcagctcagcgttgcgtttcgcatcctcgatggcttccggcacgatttcgacgccgtatacttttttcgcctgcttcgccaagaaaagagaaatggttccgatgccgcagtaggcgtcgatgacggtttctttgccttgaagctctgcgtactcaagcgctttgtcgtagagcacttttgtctgttccgggttgacctgatagaacgatctggcggagatggcgaatttgacgtctccgatgaggtcgtagatgtattcttcgccccagatgacgcttgtttcgtttccgaagatcacgtttgttttgtttgggttgatgttttgcacgattgatttgacgtgcggaaattgcgccgtgatgtcttcgatgatcttcgctttgtgcggaaaatcgcttgttcttgtgatgaagacgatcatcatttcgcctgtgacgacgccgtatctcaccatgatatggcggagccagcctttgtggcgttcttcattgtaggctttgacgccataatttgcgcaaatgtctttgaccgcttggacggcttcgtcgtttttagattgctgaatcaggcaggcgctcatgtcgatgatgtcatggcttctttgctgataaaatccggcgacgagtccgccttctctttctcctaccggcacctgcgctttgtttctgtagttccacgggtcttccatgccgagtgtcgggtgcacgataacactggacagatccagcttgccgatccgttctaaaacgtctttgacttgtttctgtttaaacaagagctggccctcgtaggtcatgtgctgaagctggcagcctccgcattgcttgtagatcgggcacggggcatccgttctgtgcgggctttcttccttcagctcaatcaagcggccgaaagcgaagccttttttgacgcgtgtcactttgatttgcgctttttcctcgggcagggcgttcggcacgaagatcgggaagccctgaatctttgcgacccccgctccttcgtgcgtcaaatcctcaaatgtcacgtcatagtattcatttttttctaccgggggtttcattttcatctataatcacctctagttttaccaatagccttgtttcagcgtgctggcaaaccttcaaatctgtcaggccttcaaaggtttccgatcacgctgaaaagatgacaaaatcctaaaacgaatactgttttaggattttgtccgcgtattaatcatccagctgttcagctttctccttcggcatgacgacgtgaatatgtctgtacagattcacgaattcgcctggcagcatgccgccgtattcgccgtccaggttcagctgcatcttttctgatacattgactttcacacggttcgcttttgtgtaaataatgtgctgatcgttaatatgatcgcctctgagcgccatgctcgcgactctgataaactccgcgagattggcttttttcaaaataattaaatcaaacatgccgtcattcaggctggaatcaggggccagcttctcgaatccgccgaccgagttggtcagcgtcactaaaaacagcatgatttcgccttgaaacagcttgccgtcatattcaatctcgacttctgtcggacgaagtgaaggcagcatttccattccttttaaataataagcaagctggccgagcatcgttttcagtttgcttggcacatcatacgtcagctccgtcagacggcctccgccggcgatattgataaagtactgtccgttcacctggccgatgtcgatcgggcgggccacgccgttaatgacggtatcagcggcattcagtatattttctctcggaatgcccagcgctctggcgaagtcatttgtcgtgccgaccggaatgacgcccagcgtcggtcgtttgtctaacggcgcaaggccgttgacgacttcattaatcgttccgtctccgccggctgcgacaattaggtcaaactcccgcaaagcggcttcttttgcggcatgagtggcatctcccgcacatgtggtggcatgggtggaggtttcataaccggcttgttcaaatttttgcaggacctgggcaagatttttcttaaaaagctcacgtcctgaagtcggattgtatattatgcgtgcacgtttcattatctcatcatcctacttaagagtatccgatccattattaacactaacaacctttaattatactatgacttgagaaaatcgcaacaatatgtacaggaattggcagaagaaaaaaggccctggctccatttaaggagccaaggcccgctgtcttactcttcttccgttccaggttttttcttacggaatttcaccaatacttcatatacgatcggtacaatcagaagggtaagcagagttgaactgattaaaccgccgataacggtgacaccgagtcctttagatatgacctgacttccgccttcgaagcccaatgccaatggaagcagggcgccgattgtcgcgatcgccgtcatcagaatcggacgcaatctcgtagagccggcttcaaggagcgcttctctcgtcgataagccttccgcttctttatggatgacgcggtcaattaagacaatcgcgtttgtgacgacgattccgatcagcatcagcataccgatcatggcattcaggctgactgtctctccggatacatacagtccgactaatgcgccgatgaccgtaaacggaagcgagaacagaatcgcaaacggcgctaatgctccgccgaacgtgatcacaagaacgaggtatacgatggcgactgcggcaagcatcgctaagccgagtttcgtaaaggaatcagcaatatccgctgatacaccgccggtatcgatcgatacattgtccggcttatccagtttgtcaactttcttttgaacggctgatgacaccttcgtgatgttgtcagaagtgacggttgccgttacgtcagcgtacactttgccgtcgcgtctggaaatggtgtcagatgtcgtgccgtttttcactttcgccacatcgccgatttttacttcttggcctgcaggcgatgtgatggttttatcctctaattctttcacactcttatactggtctttttcagtcttgatattcacgtcaagctctttgccgtcttttttcaccgttgtcaaaggagactgtgacgtttgagacatcagggcctgggagatttgcgaagccgttaagccgagcttgctgagcttctcctggtcagcgacgaacgtgtactcatcatatgtgctggaaaggcctgagtttacgtccttcagatccttttgctttttcatgatgctttcgatttctttgaccgtgcctttaatatcagactctgaatctccgtacacatagtacgttaattcattgttgttgcctgacgaactgaaattttgcgttttccattcgccgcggctggatgtttttttgatttcttttaagacattgtctttttctttgtcaaaatcaggtgtgtcttcttcgtatttcacgtagaacaatgcgccgttcgagcttccgccgagcgggctttgcgagcctaatgaatactggacggtatcgacatgtttgcgtttaagcagcatgtcttccgctttttgcgcagctttttcagcttcgcttttcgtttcacccggttcaggtgtatatgtgagctgcatcgttttgtccgcttgtgccggcagatagctcgcgccgatcagcggtacgaggaacaaactgccgacaagcatcagaaccgcgatgatggatgtaatccatttatggcttaatgaccaattcagcacttttttatagaaatcggccaatctgcccggcttatgctctttcgctttaacaggcgcgcctgtgagcgattttttgaataaactgtgcgcaagcattggcaccagtgtgatggaaatcaacaatgatgcggcaagcgcgaaaacaattgttaatgcaaacggcataaacagttcgccgatctgtccgccgaccatggcaagcggcaggaatacggcaatggttacgatcgttgatgacatgatcggtttaaacatttctttcgtcgcttcacgcaccaactgttttccgcgtaaaggctcatctttcagcctcatgcggcggtaaatgttttcgataacgacaatggagtcatcgactacccgtccgatggcgaccgtcatcgcaccgagcgtcataatgtttaaagtgacatcaagctgattcagcacgagaagcgcaatcagcagtgacagcgggatggaaacgatagaaatcatcgttgatttaatatctcttaagaataagagaatgatcacgaccgcaaagatcgcgccgaaaatcgctttgcttaacatcgtatccactgactctgtaatcggcttggccatatcaagagtcgagctgtacttgaaccctttatggtcttttttgtattgattcagttcatctttaatcgcatcggccacttctaccgtgttggcgtcattggcttttacgatattaattccgatgctgtcctttccgttcgtgcgggaaatggattctgcttttttcacatctttaatgtcggcaatgtcagaaagcttaaccgtcggaacccctgctgatgcgctttgctgtgcctgctgcgcagcctgagcgtccgccgcagatgccgcacccgcgccgcctgcttgaccttgagctgcggaagaagatgtgaccggaattctcatatctttcagatctttaattgacgtaatatttccgttaacgacaactgatttttccttgttgccgaatgtgtataatccaagcggcgtattgacgtcagagccttggattactttcttgacggtatcttcatcaagtccgtactctttcatttttttatctttgaaagagaattccacctgctcttcctgctgtccggaaacttgcacggacgcaacgccctggatgccttcaagcttaggaacgagagtgttttccacgtttttggtcagatcttcaagcgagcttttatcacttgtcacactgagcgtcaaaatcgggaaagagttgatgctgtaacgggaaatgtcgggctttttcgcgtcgtcgggaaggctgacattatccagcgcttcagcgacttcggttttcgccttgtccatatccttgttgtaatcatattcaatcataaccgatgagacgttttcagaggatgtggacgatacgacgttcactccttctaaattctgcaccgcctgctcgatcggtttcgtcacgtcatccgcaacttgactcggagcagctccgggataagtcgtatttactgagaggtaaggcatgttgacgtccggtatggattcctgcttcatattcagaccggcatacagccctgctacagtaacgataatcgtcatcagccaaactgcgaatttgttcttcagtacaaagttaataatgtggttcatcatgtcctccgttattttttattgactgactggtcattctatataatactaaacggtataactcaacatcgtcaaccaataaggcagtaaatttttctaaatttttcaaggattaaggggaagcacgtcatgaacgaaaaaaaagagaaaatcattaaaacaggcatccatttatttgccaaaaaggggttttcttcaactacaattcaggaaatcgccggtgagtgcgggatctcaaaaggtgctttctaccttcatttcaaatcaaaagaagaccttttgctgtcagcatgtgagtattacatcggcatgtctatggaagaaataaagaaaatcaaaacagaacatcagcataaaccgcctaaggacgtattccaaaaacaaattgcttatcaattccgggaatttatggagcacaaggattttatcattctcttgctgagcgaaaaggtcattcccgaaaatcaaaaggtaaaacagtattttcatgaggtcaatattcaatttaacatgctgtaccgggatgctctgctctccgtttacggagatgccgtcacaccgtttctggcggatgcatccgttatggcgcaaggaattgtaagctcttatatccatttcttgatttttaatgaacatacggcatttcagacggaaaatgtggcggcctttctgattgccaggattgatgatctgattacgggactgataaaagacaatcccgacccgcttttatctgaggatatctttactcagcccgcggcggacagagaaaaactgctcgcggatattcaaatggcaaaagcgcagcaggggctgcctgaggacgttctcgtatcgcttgaagtcattgaagaggaatgccagaaggaagagccgcgaaaaccgattattaaaggaatgctgtccaatttggccggcagcggaaatgaacagattgaaacactgcgggcttccattgaaactcatttcagccttaccatataaaaaaagcagcgcccttacaggcggctgcttttttttatcgttttttgatttcttcaagtaagatcttgttgaccatcggcgggttggcctgtccttttgaggctttcataatctgcccgacaaggaagccgatcgcgcggtcttttccgtttttgaagtcttcaattgactgcggattgctgtcaagcgcatctgtgaccagcttcagaagcacgctttcgtcagaaatttgcacaaggcctttttctttgacgattttttcagcgtcgccgcctttttcaattaattctttgaagacttttttcgcgattttagatgaaatggtccctttttcaatcagcttaatcatgccggcaagaccttccggagtcagcgcgacatcctcaagctctttttgttcggcgttcaggtaagctgaaacttcacccatcagccagtttgacgcctgtttggcttctgcgcctttattgaccgtttcttcgaagaaatcagccatttctttcgtcagcgtcagcaccattgcgtcataagccggcaggccgagctcttcgatataccgcttgcggcgctcgtccggaagctcaggaatggttgctcttacgcgttctttccattcgtcatcaatgtagagctcgacaaggtcaggctctgggaaatagcgatagtcatctgaaccctctttgacacgcattaaaatggtttttttcgtcgcttcatcgtagcggcgcgtctcctgctgaatgactccgcctgacagaagcacctgctcttggcgtttctcttcatgctcaaggcctttttgcacgaacgcgaaggagttcaggtttttcagctctgtttttgtgccgaatttctcccggccgatcggacggagggaaatgttggcgtcacagcgcagtgaaccttcttccattttacagtcggaaacgcctgtgtattggataattgatttcagcttttcgaggtatgcgtaagcttcctccggtgtgcggatatccggctcagatacaatctcgacaagcggcgtgccttggcggttgaagtcaacgagggaatagccgtcgcccgtatgcgtcagttttcccgcatcttcttcaaggtgaagacgggtaatgccgatttttttcgtttttccgccgacttcgatttcgatccagccgttttcgccgatcggcttgtcaaattgagaaatttgatatgccttcgggttgtccgggtagaaatagtttttccggtcaaacttcgtatccgttgcgatttcacagttcaaagccattgcggctttcatcgcgaattcgaccgcttctttgtttaaaacgggcagcacgccgggatagccgaggtcgatgacgctcgtttgggtattcgcttccgcgccgaatggcgtcggtgagcttgagaaaattttagattttgtttttaattccacatggacttcaagtccgattaccgtttcaaagttcacttcatttcaccccttacagttcaggtttcgctttatgatgatctgttgcctgctcaaaagcatgagcgacacgatatacagtgctttcatcgaagtgttttccgatgatttgcagtccgagcggcaggccgtccgcaaatccgcacggcacgctgattcccggcacacccgcgaggttgacagggatcgttaaaatatcgttggcgtacattgtgagcgggtcgctcgttttttcgccgattttgaatgccggtgtcggtgttgtcggtccgacgatgacatcgtatttctcaaatacgtcttcaaaatctttcttaatgagcgtgcgcactttttgcgcttttttgtaatacgcgtcatagtagcctgagctgagcgcgaaggtgccgagcatgatgcggcgcttcacttcgttgccgaagccttcagagcgtgtctgtttataaagatcgatcaggttgtccgcattgtctgtgcggtatccatagcggatgccgtcaaagcgcgcaaggttcgcggacgcttcggaagaagacagcagataatatgtcgcaagcgcgtatttgctgtgcggcagagatacttcttcccatgtcgctccgagtccttcaagcacttttaaagcggctaaaacggattctttcgcttctttgccgacaccttctccgagatattctttcggtacggcgatttttaagcctttaatgtcgcccgttaatgaagaaagaaagtccggcacttcgacattggcgctcgtagagtccattttgtccgggcctgaaatcgcctgaagcaggaatgcgttatcttccacggttcttgtgattggtccgatctggtctaatgaagacgcaaaagcgaccaaaccgtaacgggacacgcggccgtatgtaggctttaatccgacgacgccgcagaaagaagcaggctggcggatggagccgcccgtatcagatccgagtgaaaacggcacttcgcccgcggcaaccgcagctgcggaaccgccgcttgatccgccgggaaccgtatcaagattccaagggtttttcgtcgctttatacgcggagttttcagtagaagaacccatcgcgaactcgtccatattcagcttaccgattgtgacagcttcagctgcttgaaggcgctccactaccgtcgcatcgtaaatcggatcgaagttttcgaggattttgcttgagcatgttgtgcgaagccctttggtcacgatgttgtctttgacgccgatcggcattccgaagagaagaccgtgttcagaccgtccgtcaaccgcttcgtcaagctctttcgcgtaagcgcgggctctttcttcatcaagctgcaaaaacgcctgcaccttatcatccacggatgcgatccgtttgtaagattcatcaacaagatcggaaatcttgatgtcttttttatgtatcatttgtttcagttctgtgattttgtgatcaaataatgacatactgtctccctcctttaatccagaatagatggcacacggacatagccgtctttatgatcgggagcatttttcatgacatcctcgaccggaaggcctttacccgcttcatcttctctcattacgttcttcattttcagcacgtgtgttgtcggttccacgttatccgtgtccacttcattaagctcctcggcaaacgagatgatgctgtcaagctgttctgtgaacatttcagcttcttcatccgtaatggcgagtctcgccaaatgagcgacatgctttacttcttctatagaaattcgtgacataagatccacctccgcataattctccgtttcgtcatataatactgatcatatcaaaaacgagccctctaaagcaacaaaacgccgccttctgaggcatgatgaaaccttctctattttatcctaaatcggggagaaagagaaacgaattatatgtcagaaaatttttacttttataatttattggtagcgttttcatctttaagctgttctatgttggcggggattttttccttgaatggggcgggtttcgagagttgattgatcggggatactttgttaggtttagtaaccatagcctgcacaaaatcatgcgagccgcatgtaatgatgactaaaggctcaccgccggcgcaaaattccggcactactaatctacagaggtgatgcaacatttacttgaaagaagagagggtccaaaaacgtgagtattgaattaattatatctcttgggatttattttgctgccatgctgttaatcggctggtacgcattcaggaagacaacgaatatcaatgattacatgctgggcggaagaggactcggcccgttcgtaacggcgctgtccgcgggtgctgcggatatgagcgcatggatgctgatgggggttcccggcgcaatgttcgcaacgggcttatcaaccttatggctggcgctcggtttgacgatcggcgcgtattcaaattatctgctgcttgctccgaggcttcgcgcgtatacggaagttgcggatgatgcgattacgattcccgatttcttcgataaacggttccgccattcatcatcattgctgaaaattgtttccgccgtgattattatgatctttttcacactgtacacatcgtccggaatggtatccggaggcaggttatttgaatcggcattcggcgccgactacaaattcggtttatttttaacggccggtgttgttgtgctttacacgctgtttggcggtttccttgctgtcagcctgactgacttcgtacagggagcgatcatgtttgcggcattagtgcttgtgccgatcgttgcttttacccagctcgggagcgtttcgacgacgattgattcgatcaacgccgtaaacccgaaactattggatgtctttaaaggcgcgagcgtcattagcattatttcttatttggcatggggactcggttattacggccagcctcatatcatcgtacgatttatggcgattaaagaagtgaaggatttaaaacccgcccgcagaatcgggatgagctggatggctatttcagttgtcggttcattgcttaccgggattatcggggttgcttattctcatcacttcggagtctccgtaaaagatccggaaacgattttcattattttttctaaaatcttattccatccgctgattacgggcttcttgctgtccgcgattttagcggcgattatgagttccatctcgtcacagcttctcgtaacggcaagcgccattacggaagatttataccgcgcctttttcagacgggaagcgagcgataaagaattggtcatgaccggacgcttgtcggtattgatcgtggccgttatcgccattttgctttccatgaatccgaacagcaccattcttgacctggtcggctatgcgtgggcaggcttcggttcggctatcggcccggcactcttgctcagtctgtactggaaacgaatgaatgaatggggagcgcttgcggcgatgattaccggagccgcggccgttttgatctggattacgacagggcttgccgcttcaaccggcgtatacgaaatcattccggggttcttcctcagtctgattgccggtattgccgtcagcctgctgaccaaaaaaccggccgatgcttcttatcagctgttcagccggatggaagctcttttgaaaaacaagaaatagacaaaaagccgtcagatcttatccctgacggcttttttcttgcgcacttgtcctgctataaatactgtgagaaaatcatatcaatttactataagaaaaactgcggaggtgctgtgtaaattgagctggcctatcgaaccggacattttattaaagctgggcattgccacgctgatcggtatgatcatcggtcttgagcgtgagttgaaaaataaaccgttaggactgaaaacctgtatcgtcatcgccgtcagctcctgtatgctgacgatcgtcagcattaatgcggcatatcactttccgaaatattaccgtatcatgatggacccgctccgccttcccgcccaaatcatttccggcgtcggttttatcggtgcgggcgtgatcctgcgcaaaagcaatgacgtcatttccggtctgacgacatcggctatcatctggggcgcagccgggctgggtctggccacaggcgccggcttttataaggaggcattcgcaagcctcttgtttatcctgatcagcgtcgaatttcttccgtggctgatcagaaaagtcggtcccaatcgcttgaaggagaaagatatccgcgtgaggatgtctctttccgacaaagataaaatgaccgagattctaaaggaaatgaaaagcaaacagctccgcattcactcggtccggattgacgatctgcgtgaaacagaaaatccgattatggaagtgaaaatcagtgtccataaaaaccgctacaccactgacgtgtattatgatattaaagaaatccagggtgtcgtcggagtgaagtgtgatacgttataaaaaacgccggactggattcagccggcgtttttctttttatacgagggaggtaaagttatattcagtaatcggtgttttgttttcgatatcacgcctgaaacctttcagcatctcaagctcttcatccccgagtgagtcaagatcaaacgcctgatgcaataatccgtagatcagcatatggcgcaggcggaggaaatccggaattttttcaagccatgcaggatcaagatcattttcttccttgtaccctttcataaaatgagtcataaactcctctgtaaatgcaaccttgtcttcatacgggatgaccggataccacaaaatattgtacagcaaaatactgatatcattcacaaaccaattgtagccgctgtcatcaaaatcaaatgcagtgatttttccgttgtcccagttgaaattgccatggtgcaaatcggcgtgcacaaggccgtagttttccgggttcttcggcaattgccgcagttcttccattaaagcatccgcccgttcgaatacaagatgctgatcttcgggcacatattttcttagcttcagctgctcctcttcatcccattcttgccttttatatttcgggtcgctcagactgtagcttttcgtcagccgatgcatgttccccgtatacttgccaagctcataaaacagagacccgttccaatctgattcctccactttgcgtccgggcgctttttcatagactctgaacaaaaacgctccgcctttttcgtccggcacttcttcgacatctctgccatttaatgaaggaatcggttttgctgccgaaagcccgccctttgtcagatgatgaagccattccatttccccgaaaatatattccggtgttctgcggatcgtatgcgtaatttttaagatataagcttgattatcttttacaatttcgtatacgtagttctctgcgtccgcaataaattgaaacttagtaaatccgtatatttcaccggctttggccagcaccttatcttcctcaaaaatcgcttgaatatctttatgcatgctgattcaccctcttcttaacttttgtcggtgacgtgagtactcagcaaatgtcattcatcaacattcctgcccttcttttgttcatagcagattagtaaaatccgcctataaacgaatgtattttcctgttaatccctaattatacaaatatcataacatacctcatctctctcaccaacgatatacacaataaaaaacccttgctcatatagacatgaacaagggcatcttggttaatcgtaaatatggacggtcggttctttgtcacccgcattgcggacgataagcgcttcctggccgtctgatgaggtgatgttgatttcgacatcgactgagccttttgaataataatccatcagctcacccgttaagtattgggtaaaagcgatgacttcgctttttccgtaaaattgcatcgggatttcaattttcatttttctcatttcatcattttcatacatcgccgttccgactactccggtgtagttcgggaagtagctgtcgatcgcgtttttgaagcgtttaaacacttcggaatcgtcagggtatttctttgctgtgtcagtatcagccggatagaacacgtacttttctttgacatcatcccagtttgaaatggtggatgagccggctttgacttctgttttcgcaatgtaattccccggtacgattgatgtcttcggcgcttgtttataaagggcgacggtaatcggcacatttttcaggttatccattttccggagacggttaacgacttcctgggcgatttcttcaccatgactgcggatcgttttgtcgctgagctccacttcctgctgcggatcccctgtattttcgcgataatagtatacagagttgagagcgagaccgatcatgataccgccaagctggatgctgtttttatcttttcttactaagtaatcctgctcaagcatagacgctaagtaaatcgggctgttttcgtttttctcttttgccgatcccgagtttggcagcaccggatttaagccgagattctggaagttggcgtctgcttttttcgcctttttcagatcactgccttcttttttgcggtcaagccagctgagtaccgtatcctcatctaaatactggccttcctgatacaaatagtcatccgtcgggaacgtgtcttgggcgagccgcatcagtcccgtctcgaattcatcgatgtccagcctcgtattcagccggtccgcggtcagcccgcgcgcttttccggccttaaacggaagcaccatcttatagtaggaatcagagatattatatttcggtatgatcgctttttcagaagactttgccgttttctgcgtgatctcttcctctttgtttcccccgaaactcggcgaacaggctgacagcatcaatactgccgccgttgccgtcgccgccaatgccaacatctttttcaatagaaaacactcctcttatttctttagctctcccaatagctgtgcttcatcccatacttcaatgtttaattcctgcgcttttgtcagcttgcttccggccgcttctccggcaatcagcaagtctgtttttttgctgacagatcccgtcagctttccgccgagcgcttcaatctgcgttttggcttcatttctggacagctcttcaagctttccggttaacacgatggttttgccggcaaaataagagtcgctgtcctccgcttttacttttttcgggcctttatagagtgtgttcacaccgagctcttccagttcattcaaaagctcaagcatttcttcttttcggaaataggtgatgacggcatcggccatcttttcaccgatttcatctactgccagcagctcttcttccgtggcttgtttcagattttccaggctttcaaaatgcatggcgagtgttttggccgcttttgagccgataaaacggatgccgagaccgaacagcaggcgttccaatgaattctctttcgatttttggatggagctgatcagattgtcagttgatttttctcccatccgctcaagccggatgacctgttcttttgtcagcttatataaatcagcgacattacggacgagatgttcacggaaaagctgtgtgatgacacgttctccgagtccgtcaatattcatcgcgttgcgtgaaacaaagtggatcaggccttctctgatttgcgccggacattccgggttgatgcagcgcagcgcgacttctccttcaatgcgcacaagctcgctttcgcactcagggcagacggtcggcatattgaattctttttcttctccggtccgctgttcaattaagacattgacgacctcagggataatgtcgcccgcttttttaacgaccactttatcgagaatgcggatatccttctctttaattaaatcttcgttatgaagcgatgctcttgagaccgtcgttcccgcgacttttaccggttccagaacggcggtcggcgtaatgacgcctgttcttccgacattcagttcgatatcgagaagttttgtcacgacctcttctgccgggaatttatatgcaatcgcccagcgcgggctttttgccgtatacccgagctcttcctgctggtcgagcgaatcgactttgatgacgattccgtcaatttcatacgggaggtcggcccgcttcgcctgcagctcctcgatcatttcaattacttcatctatcgtggcgcattgtttccgttcctggtttgttttaaaaccgagctcatccagaaaatccaggccctgactctgtgtttccacacccatttcgtcaagctccgctatactgtagacgaagatgtcaagatttcgtttcgctgcaattttcggatcgagctgtctgagtgagcccgcagcagcattccggggattggcgaacggctcctcttcatgtttcagccgttcttcattgagcgcttcaaatgactgtttcggcatgaacgcctctccgcgcacttctatggaaaggtttcgtttcattttcagcggaatgttgcggatcgtttttaagttttccgtaatatcttcgcccgttgttccgtctcctcttgtcgcgcctctgacgaaatagccgtcttcataacggagagaaacagcaagaccgtctattttcagctccacattgtaagcgacgccgtccccgacagcctgacggacgcggcggtcaaaatcgcgaagatcatcatcgttaaatgcgttgccgagactgagcatcggcgtgccgtgctgcaccttttgaaatgattcaagcaccgctcccccgacccgctgtgtgggcgagtcaggcgttctgagctccgggtgctcttcttctatcgcaatcagctcctgcatcagtctgtcgtactcggaatccggtacgctcggttcatctaaggtgtaatattcgtaactgtactgatcgatggtgcggcgcaattcatctgcccggtgtttcgctgtttctttgtccatcatgttcttcctttcctcttcaggttactgcttttcaatcggcgcaaaggcggccagcagccgcttcacgccgactgggctcgggaatgcgatatcaagctccgtgctttcgccttctccttttacgctgacaaccgttccggtgccccattttttatggcccgctttatcgccgacagcccagctgagcgagtcgccgcctgttttattcgcgtaggaaacaggacgggatacgggcccgcgtttcggctgcatttttctccccggctgcatgcgcgggtttttcttctcatttaggttctccaataaatcgccaggtatttccctgataaagcgggattccggattcatattggtgcgtccgaatagggtgcgcattttggcattcgttaaatacagttcttcttccgcccttgtaatgcctacatatgcgagtctgcgctcttcttccatctcagcttcttccatcagggagcggctgtgcgggaacacgccttcttccatgcccattaagaacacgacaggaaattcaagccctttagcggcgtgcagagtcattaacgtgacggcatcctttccgcccgattcctcttccttctggtcgagctggtcaatatccgcaatcagcgccaagtcggtcagaaacgcgacgagagacttgtcttcgcttttttgttcgaagtttttcgtcacagaaagaaactcgtcgatattctcaagacggctttgggcttcaattgatttttcagccttcagcatttctctgtattccgttttatcgagaatttcttccatgagttccgtaatggacaggtaatcctgcatattcgtcagattttcaatcattgcgccaaagccgtcaagcgcgtttgccgctttggcactgacgccgatgaaatcaacctgtttgatcgcctggaacagtgacatcccgttcatcgccgcgtatgaagcgattttttcaagcgaagtggcgccgacaccccgcttcggcacattgacgatccttgtaaaactgatatcgtcgtccgggtttgacacaaggcgcagatacgcgagaatgtctttaatttctttcctgtcgtagaactttgttccgccgacgatattgtagttcagtccggcttttaaaagggtttcctcaataacacgggactgggcgtttgtccggtataaaatcgcgatatcggaaagcttccgccggcccgagctgttcagctcataaattttgcccgcgacgaattggccttcgccgaattcattgtcgccgctgtaataagaaagcttgactccttcgtcattccccgtccacaagtttttcggcttgcggtttgagttgtttttaatcacttcgttggccgcttgcagaatccgctttgtggagcggtagttttgttcgagcagaatgacgtttgcgctcgggtaatctttttcaaaagaaaggatattcgcgatatccgcgccgcgccatctgtaaatggactggtcggagtcaccgacgacgcagatattttcaagacgggcagcaagctgcttaacaagcaggtattgcgctctgttcgtatcctggtactcgtctacgtgaatgtactggaatttgcgctggtaaaactcaagcacttccggcacacgctcgaaaagcttaatcgtcgtcatgattaaatcatcaaaatcgagcgattggtttttcagcagttttttctggtaatcggcatacacgtcactcgtgacctggtcatagtagccgccggccgtttttgcgaattcctccggttcgatcagctcgttttttgcgctgctgatggagcctaaaatacttctcggatcaaactttttcggatcgatattccgctctttcaaaatccctttaataacggagagctgatcagccgtatcaagaatggagaagttacggttgatgccgatcctgtcaatatccctgcgcagtatccgcacgcacatgctgtggaaggtggatatccagatttcatccgcgccgggcccgagaatgctctcgacccgctccttcatttctctggcggctttatttgtaaatgtaatcgccagaatattccatggcgcgacgtgtttttccgccattaagtatgcgattctgtgcgtcagcacacgtgtctttccgcttcccgctcccgccatcagaagcagcggaccgtccgtcgtcttaaccgcttcctgctgaacgggatttaatccgcttaataattgattgctaatataattcatatccgttcaccgcctatcaaacatatgttctatcataaatcaaattcgtctgcttggctacttcgtctttacagccgccaccgttttgagcgcctgatcaaaatcttcatatacggcatttcctacaacaatgacatcggcatggcggccgaaccgttccgccgtttccgcatctttaatgccgcctccgtaaaacaggacggacttgtccagcacagctttcgttttctccaccgtttctatgtccgccagcattccgctgtattccaaataaaaaatcggaagatgaagcaaatgctccgcgacccgcgcataagcgagaatatcttctgtttctatatgtgtatccgcctccgtcaaagcggccgctttacaatcagggttgacgatgcaatagccctccgtcacgatttcctccatggacatcagctcgccgtattctttcatcgcctgatggtgcatgccgacaatccagtccgcatttttgctgttgagcacactcggaatgaaataaagatcaaatccgggcacaatggaatcaatcgtcgatacctcaagtacgcacggcactaaaaaacgccgcacctttgacatcagtctcagcacattgtcctcggtgatattgtcgcttcctccgatcacaatggcgtcagtccctgattcacaaagccgttccagctgttcatccggtaaatctttattcggatcgagtttaaaaacgtgcttccactcgttaacatcgtacatgcgttttcgttcctccattcgtttcttgccatttaaacattataacaaattcatttggcccggaaaaacggaaaaagacgtcattcatctgattcataaaaaaagatggcgctccggcggacgggaaacggccatgtttgaaaacagacaaaatgtggaatgtcaaagagaaaaaaggcaaggagtctgatttcaatggaacaagccattatcgtactgatatgtatattgatttttattattttagttcccgccgtattgctgctttggatatacataagagacgaaaaacaggaagaacattcagtgctgcgcaattatcccgtagcgggaaagctgcgctatatatttgaaaaaatcggaccagaactgcggcagtatttattcagcaatgataacgaagaacagccgttttcccggagagaatatgaacagacggtcatgtcgggaaagtataaaagcagaatgatgggcttcgggtcagaacgggatttcgatcagccgggctattatatccggaatgccctctttccgaaacaaagggaggagctgcgcacagatcaaacgccgaagatcgacacgatggtatacaagattgacaaggacaacctgctgaaacgcagcgaacaccgcgaaaaaacaaaagcggatccttattacctgcatccggacgatgtacaagtgatcggccgtgacacatgcaagaaaccgttttatgtgaaaggattaatcggacaatcagcgatgagctacggctcacttggcgaccgggcaattaccgccctgtcaaaagggctgcaccaggccggaggcacgtggatgaatacaggcgaaggcggcctgtctgagtatcacctgaaaggcggtgcggatattatctgccaaatcggactcggactgttcggcgtccgtaccgaagaaggagaattttcgtgggaagaatttaagaaaaaaagccgtctcgaacaaattaaagcctttgaattaaagcttgcgcaaggagcgaaagcaagaggcgggcatattgacggttcaaaggttaccgaagaaattgccgccatcagaaatgtgcagcccggacaatccatagacagcccaaacaggttcaatgaattctcaaatgttccggacatgcttgattttattgaggaattaaggactgtcggtgaaaaaccggtcggcatcaaaattgtcccgggcagccgaaaagaccttgaagatcttatttcccgtatgagttcatcaggcaagcttcccgactttattaccattgacggcagtgaagggggaacgggtgcttcctttcatgagctggcggattccgtcggtctgccgattatgaccggcctcccccttgttgacggccttttgaaaacatacggtataagagataagctgaaaattttcgcatccggaaagctgctcactccggataaaatcgccgtcgccctcgcgttaggcgcggattttgtcaatattgcccggggaatgatgttttcagtcggctgtatccgcgctcaagtatgccacaccaatcattgtcctgtcggagtggcaacaaccgatccgaagcttcagcgcgcgctcagtatcgaagacaaacagcaccgcgtctgcaactacgtgctctccttgcgtgaaggactgtttcaccttgccgcggcggcgggcatcagctcgccgattcacttctcagctgaacacatcgtataccgagaggaagacggcagcctgagggaacttcccggccttatgaatatgaatcagcacgcataaaaaaaaccgcctgccgtcatcggcagagcggttttttacgttgctgaggaggattctcctttgtttacacggtcaagcgccatttcataggcgtcgttgccataatttaagcagcgtttcacccgggaaatcgtcgctgttgaagcacccgtttcgctttctattttgtgatacgtgtttccttcgcggagcattcttgccacttccaaacgctgcgccagcgattggatttcattaatcgtacaaagatcatcaaagaaacgatagcattcctccagatctttcagcgataaaatagataagaataactggtccagttcttttccgcgtaatttatcgatttgcatcgtcaaacaccttctcctttactaatggaagctgcatcgagatcaggcacgatattaatccatgtctttcctggcacaaacggaagaatctcaccgccttttacgggcagaatacgtccgtctttatattcccagtctgactcaataacatcgccgtgctgaagcaggaggccctttccccctgattgaatatcgatggcccgccttccatctttgtctgtaatgcgatggccggcttcaacaataaaaatgttgtgcatggctaaaggctttccggtctcccggtctgtcgctttcacaccatcagagcttcttgtataagcatcagcttttttatcataatcgtattcgacaagatttgtaacgttttgtgttccataatctatccgaatattgtaggtttcgtttccgggttttgcgtctgatgtctgaaatggaagcggttttgttttttcgttcagcttgtatcccttttgttccgccgcctttctgatattgtcataagacgtgtaggaattgtggggaggcttgctgaaatcggctctccaaaacaggcttccgtcaaaatccaaaccgtttatataatcgtaagctccggactccagctgctttttagcgccgggactccagccatgatggacaaatatgctgttaaatccgctgctgagggtgacaaaatattccctcgcgctccgcacaggtccgaccgtttccggcatctcactctgaaaaatcgcgagaaaccgcgtaatccggccctctgccagcgcttcgatgacaacatccgcctttgacagcccggattggggcctcgccttcggatgattgttcactgcgactgcaatcggacggcgttctgcaagcttccgctcagttttcaaccctgttaaaggggcttccgcctctttcggctgcacctgatcggcatcattctgccggcaggcggcaagcagcaaaaacgcaaaacaaagcatacaaacggttttccatcttttcatatgtcggctccctgcttttatattttaacgcattatcgatggaaagagtacagtttttttcatcacgtcgaatattcctctcggcgtaatgcgaatataaggcaggtgtgtgctctgcaaaaagagcagcgtatagatcggatcgcagaatcggtagccccgctcctccagcagaatcctcagtttttgttctttctcaagcacctcttcataattctccgcagatgcggaaccatttaaggcgaggggaatttcatgaagaattttcccgttttcggcaagcacgattcccccgccgatttctttcatccgtgagaaggcgagcaggatatcttccttattttttccgacagcgataatatctccggttgtagtgtaggaactgacaaagccctgcacccgctcggcaaaacctttcagcattgtattgacccgccattttccatgcttatcgagaagcgtgagatagctttcatcatgatcaaaagaaagctggtcaacagaattatcaatcgcaatcatatacggctccataatgaccgcgttgcgcattttcacacccatcggcattgaaaactgtaaatcatccatcttcatatcatatgaaagctcaagagggacaagaccgccctttttccaatccgtttctgtaaacgccttcatatttcggccgtcttctctcagcaggatgcctttggatatcaccgtaaccgggtccggattcatagggtcatcaagaatgttcaatgaggcaagccgtcccgggccgactacaccgagaaagtcgtccatctgataatacttcgcgatattaaaggacgccatattgtaagcgtcaatcgccggaactccttcctccagagcgattttgattaattcattcgtcatgccgcctttataaaaaagcggcgacgccccatccgtcgtgtaaaagaaatgatcataatgccggaagcctttttgatggaggtcctgcagaatcgtcctcaaatcagggcggatggatgaatgcctgagcgacacatagtagcccaattcaagccgtctcatcacctcatcgccattcatcgcctcatgatcggaatcagcgccgaacagtttcatcttcgtaagtgttttctcagaagcgccggggaaatgcccttcgatccgcttgcgcagtttctttgtcgcctgcatgcaatgaagcatcaagtcatccccgtccatgagccgcggccagccggtcaattctccgccttgaatgacatccgggtgctcaatccattgcttgcggacatcaaaagaaagaagctggtcctcattcagcacttcagtctgcagatcatatctggaccaccagaaatattgcaccggctgttttttcagttcttctaatatggtaagcgctttcttttttccgctgtgcaaaaggaaaaacaagttatcattaacaaacgtcgttgttccgaattgagacacatattcggcgagcgtttggggattatatatttgaaaaggatgtgtatgcggttcaatgtaacctggcacaatgtattttccttcacaatttatggtatgaatgtgctctgctgcatcaggaagctcatcaccgacatatacaattcggtctccgtaaatccagatattctttttcagccattgttttaaaaaaggatttaaaacgagagcgttccgtaaaagtagcgttggaagcagctttgagtctacaacatccgcctgtgatctgatgtctttatttttccagttaaaggtacgttcggacattcacatactctccttcgcttatattagactcatcgtatcacatccgcacaattatcgcacggttaaaacgttacaaattattgaagatgaacgaaaagtaaaggagctgaaataatgaaaccgaatatcagtttattaaacgccgttatgcgaatcacttgcggccttaccattttgtctgctgcgtcagcaaaatacacgagaaaaccgtggtgcaaaatgcatcttttctgtatgatgatgggcgcaatgaaagcggcgtccggcatcctccgcttctgtccggtaacatatatgttccaggctggaatgaatcaggatgacagccgccagtaagaaaaataacaagccgtttcggcttgttatttattttctcctgttataaaagagtccggcgagtccgagaaggatcggataacagaaagcccagccgctgaagctgtatatgccgatacaaagtccgagtgacgccagcgcggaccaccagccgataccgaagcggcgcagcagcttgagcccggccgccatcgtaatgacgtatgaagcgataaatgcggcactcgggcccttcagcagcacttcaggattgagctgaaacacccattgaatcaaaagcaccgtaaaaaatatggcgccgagcgtcgtcagcacacgcacaggggtgcggtttttttgatgcagccggtcaaagtatttcggaatatgcccttcccgcgacatcgcatacaccattcttgaaaagcccgcaatattggcatgaacggtgctgaatgtaataaacagcgccagacatgcggttatgtatactcccgtccgccccgttccgtttgccatcagcaaattgagagacgcgatgcctttttcgtctccgtaagcatgggttccgaccgtaacataagcagtcagcgtatataacagtcccacacacgcggcagccgcaaacaggctgatcggaatatcccttttcggatgtttaaactcttcggcaagcggcgtaatcatttcccagccgacaaaggagaaaaagatcataactgcggccgagcctgcggcatgccatccgtgcgggagaaacggatgaaaagagccggacgtgacatgcggcagtgaaacggcaacagccgcggctaacaacaatataatcaaacaaatgatcagcgtgccgatccctgcggatagctgaagccctcttaaatgaagaaacagagataaagcaagcatcgctgccgcaatcaatgtaacggcacccgcacccgctccggtgacgcttgtgatgtactgagcaccggtcagcgcgataatcgggacgccgatcggaactgatccaagcatgatccagcctgaaaccgctccggcctttttctgaaaagcaagttccgcatatgctgtaatccctcctgcactcggcactttctgcaccaaggcggagagtgtccccacaatcggaaaagccgccaatgacattaaaagccaagcagcgagcgaagcaggccccgctgtatttgccgcaacagaaggcagaattaaaatcccgcaccccaaaacagcccctatcgtcaatgcggttccctgcacccatgtgagagagcggcgcagcgtattcatggtgattccccctttttgaaaagctggctttattataaagaaagaaaacggtcttccatatgctacaattaagcaaaaacggtttctttcatttaaaaataaaggaattacaggaagatcacttaaaatgaaaaggggcagccttatggaccaaacagacttacatattttatcgcatttgcagaaaaacgcccggctgacaatggtggagctcggcaagcttgtcgggctcagctctccaagcgccgctgaacgggtcaaaaaacttgaagaaaaaggcgtgatcacgggctacggcgccaatatcaattttgagaaactgaataagcacgttacggcttttatcctgatggaaccgagaaactgcaagcattatgccgcatttgccggcaagcatccggatgttatagagaaccacagaatcaccggcatgtacagctacatcacaaaagtcgtgacagaatccgtccatacgctggaagactttatcgatgaatgcatgtcacacggcaagccgacaaccttggtcgtcctgtcttcctcagcctttgaaggcgcccttacgtaaaaagaaaccccccgcatcttcatgacgcgggggttttcctcattatcgcagcgatgctttcagcgcacggacgccgatatcgcttctgtaaaacagtccgggttttgtcagaccggaaacggcgctgtacactttatctctcgcctcttcaaatgtctcagcaaatgccgtgacattggcgacccggccgccgtttgtgacaaattgatcgccgtcttttttcgttccggcatgaaaaacggcgatcccgtcttcagcggatgtcaaactgccgatcggtgtccctttcgcatagccttcaggatagccctcagaagccagcacaacgctgacagcggccgtatccttccaccttaggtcaacatccttctcatgaagcagatccaaaagcacctgaatgaggtctgattccattctcggcaccacaacctgtgtttccggatcaccgaagcgcgcgttgaattcaatgacttttgatccgttttccgtcagaatcagccccgcgtacagcacgcctgtgaaggagcgtccctctttcaccatagcttttgccgccggcttcacaatcgtttcgacagcgcttttgacgatgtcatcggaaatgtgcggcaccggtgagtaggcgcccattccgcccgtattcggccctttgtctccgtcgaaggcgcgtttatggtcttgggcgatcaccatcggatagacggtctccccttttacaaacgccattaaggaaaattcttcaccggcgagaaattcttcaatgaccacggatgcgctcgcctcgccgaatttctcatcctcgagaaaatcatgaaggcattcaatcgcttcctcttccgtcatcgcgaccgtcacaccttttccggcggcaagcccgtccgctttaatgacaatcggcgcgcctttctgctgcacatatgctttcgcctcttcaaatgaagtaaacgtctcatactccgccgtcggtataccgtattttttcattaaatccttcgcaaactgtttgcttccttcaatgattgccgcttgttcggacggcccgaaaacaaggagtccggctttttcaaactcgtccgctatcccttcaatgagaggaacctcgggaccgataatcgtcaggccgacatgatgttctttcgcaaaggcaatgagtccggcatgatcgctttcttcgatgctgaccagcgtcgcgcagtctgccataccgtcatttccgggcgcggcgtacaccgtgtcagtaagcggactttgcgccgctttccaagccaatgtatgctctctgccgcctttaccgataatcaatacattcacgcttcgttcctcccttaatgtttgaaatgtctgatgcctgtgaagaccatggcgatgccgtattcatccgcttttttaattgaatcttcgtcgcggaccgatccgccgggctggatgatcgccgtgacgcccgcttttgcggcttcttcgactgtatccggcatcgggaaaaacgcgtctgatccgagcgcgctgccttttgctttttctccggcctgctcgatggcgattttggccgaaccgacgcgattcatctgtcctgcacccacaccgaccgtcatatggtcttttgcaagaacgatcgcgtttgatttcacgtgtttgacgactttccaagccagcttcagatcttcccactcctgctcgctcggctctctttttgtcggaatgctgatttttgcgtcatcaaatccgtgcacgtctaaatcttgaatcaaaaggccgccctgtacggaagtcagctgtttttctttcttccctgctgcattcacgtcaagcgtgagcagacgaaggtttttcttcgacgtcagcacattcagcgcttcttcactgaaagaaggggcgatgatgatttctaaaaagatgccgtgaagggcttcggccgttgcctgatcaacttcacggttgagcgcgatgatgccgccgaaaatggacgttttgtccgcttcatacgctttattgaacgcttcctcaattgtggctcccgtaccgactccgcatgggttcatatgtttaacggcaacagcggcgggttctgtaaattcccggacgatttgaacggccgcatccgcgtctttaatgttgttgtaagaaagctctttgccgtgaagctgttttgccgccgcaatggaaccggagacaggcagtgcgctttggtagaaaacagcctcttggtgagggttttcgccgtagcggagcgattgttttttctcaaatgtaacggtgaattgctcagggtctttctcaccggcctcgtgtgttaagtaatcagcaattaatgcgtcgtatgccgcggtgtggcggaatactttggccgcaagctcgcgttttcttttaagcgaaacgccgccgtattctttaatctcattgagcacggagctgtaatcggccgggtccgtgatgaccgtcacatcctgatggtttttcgatgcggcgcgcagcatgccgggaccgccgatatcaatgttttctatcgcttcatcgtatgttacgtcttcttttgaaatcgtttctttaaacgggtaaaggttgacgaccacaagatcaatgggtgcaatgccgtgttcattgatctgcgccatatgctcttcattgtctcttacggcaagcaggccgccgtgaatattaggatggagcgtttttaaccgtccgtccataatttcaggaaatccagtcacttccgaaatgccgatgacatccacaccgttttcctggagaagtttttttgttcctccggtcgaaatgacttcgacgccgagctctgtcagttcctttacgaaaggtacaagatttgttttatcagaaacactgattagtgcgcgtttgattgtcatgccttttcacctctgttatttagtcccagcagctgtttcacaacgctcggataccatttgtgctcaagctcgtgtattgtatgttccatatcttcaagcgtatcgttttcctgtatctcgaatgctttttgcgcgataatcggtccggtgtccatgccttcgtcgacgtaatgaacggtaatgcccgccactttcacaccggcacgatgcgcttgtccgacagcgtcaatgcccggaaacgccgggagaagcgacggatgtatattgataatcctgcctccgtatgcttcaagcagcgtatctccgatcagtctcatatagccggcgagaacgattaattcaaccccgtgaaggcgaagctgctcaataatggcccgttcaaaggcggccttgttttcaaaagctgacggttcaaaggcgaatgacgggatttgtaaagcctcggccctttccaccgccttcgcctgaggcttgtccgtcacgagaagcgatagctccgcgtcccacttctcttctctcatgcgtttggcaatggcctcgaagttcgatccgtttcctgaagcaaatactgcaaattttttcatgaaagagccgcaccgccgaaagaaatgccttcgccctgcttgacccgcccgatcaaataagccttctcgcccttagcttcaagcgtgtcgatgacgtctgtcaggttttcttctttaacggcaaggacaaaaccgatgcccatgttaaagacgttgaacatttcttcttctttcagcttgccgtgctcctgcaaaaacggaaaaatcggcgggatcggccatgacccgtgatcaatttccgcgctcaatccgtccggcagcatccgcggaatgttctcgatgaatcctccgcctgtcacatgcgccatgccgtccaccttaccgcttttcaccgcttcaagcaccggcttcacatatattctcgtcggttccagcaattcttctccgagcggccgcgcgaagggttcatagacagtatccaaatcaagtccgccgtcatcaagaagcacctttctcacaagggaaaatccgttgctgtgaaggccgcttgaagtaagtccgattaagagatgcccctcttcgatatgttcaccggtgacgatttcgtctttttccgcgactccgactgaaaagccggcaatatcgtattcatcagccgtatagagccccggcatttccgccgtctcaccgccgataagcgctgatcctgactgctcgcagccatctgccacgccctgaacgatctgctcaatttttaccggatcggccttgccgactgctaaataatcaaggaaaaacagcggctccgctccttgggcgagcacatcatttacacacatcgccaccgcatctacgccgatcgtgtcatgcttatccattgaaaaagcgagtttcagcttggtgccgacaccgtctgttccggaaattaaaacaggcttttgatacgggagctctgacagatcaaacattccgccaaaaccgcccaagcttcccataacgccgagccttttcgtgcgctccacatgttttttcattcgtttgacggcttcatatccggcttcaatgtcaactccggcatttttataagcatcagacatccctatcactccttgtcaattcgtttctcctcaaaaggcagaaagagaaaggcagcctgaaatcgcgctgcctttatatcattttcagactttattttgtcagcactgcttcttttacgtgaggaagcactgtatcctgataaatttccgtcggatatttgcccgtaaaacaagcgaggcattgtccgcaattggtgtcttcaaattttcggccgactccttttaacaatccgtctacacttaagaaagaaagcgtgtcggcgccgataatctggcggatttcttccactgaatgcgaggaagcgatcagctcctcatgggttgatgtgtcgatgccgtagaagcaaggatgggcgatcggaggcgaactgatctttacatgcacctctgtcgctcccgcttctcggagcattgtgacgatccggcggcttgtcgtcccgcgcacgatggaatcatcaaccatgacgacccgttttccttcaacaacaccgcggacggcggacagcttcattcttactccttgctcacgaagagcttgagacggctggataaacgttctgccgacgtaacggtttttaatgagaccgagttcgtacggaatgcccgttgcctcggcatagccgatggccgcggaaatactggaatcaggcacgcctgtgacgacatccgcttcaacagcggactcttgggcaagcattttcccgaggctcttccgggcgctgtgcacgttaatgccgtcgatattgctgtccggacgggaaaaatagatatactccatgctgcagatagaacggttgatattcatggagaaacgctctgatttcaagccttcatcgtttatgataagcatttcgcccggttctacgtcacgaaggtacgtggcgccgaccacatcaaatgcgcatgtttctgatgcgacgacgtaagcgtcgccgagcatgccgagtgaaagcggtctgagtccgttcgggtcaagcgctacaatcatttctgtttctgtcatgattaaaaaggcgtaagcgcctttcagcatggatagcgaatttttgatctgatccttcagtgaaaagtggccgctgcgtttaatcagatgagccagcacttccgtatcggaggaagtctgaaagatgctcccttggttttcaagctgctgtttcaattgtgtggcattgaccaggttgccgttatgggcgagcgcgagactgccgttgttttgcgaacggaacaggagcggctggacattttcatatccgccgccgccggccgtcgcatagcggacgtgaccgatcgcgcctttgcctttcactttgctcagttcgccgttttgaaaaacctcggtaataagcccctgccctttatgagccgtcagtttttggccgtcggtcgccacgatgccggcgccctcctgccctctgtgctgcaggctgtgcaggccgtaatacgtaatctgcggagcctcttcatgcccccagatgccaaacacaccgcattcttcattcaggcctttgatttcagcaagcatggaatagctcctttccacgcgcgctcaagttctttcgtttgcgcgtgaaccaattgttgtccttcttggcttcggatcgtcaactgtccgtcccctgtcacttcaccgatatgaacggcatctgccgcagccgcttcaaacgccgccttgttttcttcctttacggaaacgacgaagcgggattgagactcactgaacaaaagagccgcttcattaaatgccgtgatgtttgcgccgagtccgtctgtcgtcatgacgctttctgcaatcgccacacccaatccgccttctgacacgtcatgcgcagattggaccagaccttgtttaatggcgttcagaagcgatgtttggcgggctttttcaacgtcaagatcaatttcaggcgctttgccatagattttcccttcagtcattttctgaagttcacttcctgcatactcaggcttcgtttcaccgatgacgtaaatcaagtctcccgccgctttgacatgctgtgtcgtaatatgagccgtatcttcgattaacccgaccataccgatgaccggcgtcggatagatggccgttccgttcgattcattataaagtgatacgtttccgccgatgacaggtgtgctgagaacattgcatgcctcgctgatgccgtcggccgctttttcgatctgccagaaaatttcaggtttttccgggtttccgaaattcagattatccgtgaccgcaagcggctcggcaccggagcaaacgatgttgcgcgccgcttcggcaacggcgatttttccgccttcttcaggatcgagatacaaatagcgggcgttgcaatccgtcgtcattgccagcgcctttttcgtgccgcggattctgagcactcccgcgtcagagcccggagccaccaccgtgttcgtgcgcaccatgtaatcatattgatcgtacacccactctttgctcgcaattgtcggctgctgcagcagggcaaaaagcgtctctgtcgcgtcttttacttcaggcgcgggaacttcagtttcctgaaactcgcggtagtacgcgggttctgctgacggcttatgatatacaggggcttcttccgccagcgcgtcaaccggaagctcgcaaacaacctctccgttatggcggaggcggagcattttatcatccgtgacatgacccacggaaaccgcttcaagatcatatttattaaaaatatcgacaatttcctgttcacgcccgcgttcaataacgagaagcatgcgttcctgagattcggaaagcatcatttcataagcggtcatacccgtttcccgctgcggaatgagatcaaggttcatttcaatgcctgatccggctttacttgccatttcagcgcttgaacttgtcagaccggccgctcccatatcctgaatgccgactaacgcgtcgcactggatgacttccaggcaggcttcaagaagaagcttttccatgaaaggatcgccgacctgcaccgcggagcgtttttcttcagatgaatctgacatttcttctgatgcgaaagtagcgccgtgaatgccgtcgcgtcccgtcttagcgccgacgtacataaccgtgttgccgacacctttcgcctggccttttttaatatccttatgatcaattaggccgacgcacatggcattgacaagcggattgccctcatagcttgcgtcaaactgaacttccccgccgaccgtcggaatgccgatacagtttccgtatcccgcgattccagccactacttcttcaaacaagtacttcacacgcggtgaagtgagttcaccaaatcgaagagagtttaatacagctatcggacgggcgcccattgagaaaacgtcacggatgatgccgcccactcccgtcgcagcaccctggtatggctcaagcgctgacgggtggttatgcgattcaattttgaacacaaccgcctgattgtcaccgatgtcaacgatccccgcgccttccccgggaccttgcagcacgcgttcgccgcttgtcgggaatttgcgtaaaatcggcttagaatttttatagctgcagtgctctgaccacatcacggaaaaaatcccgatttccgtgtagtttggcaatcttccgataatagattcaatgagtgcgaactcgtcatcactgacacccatttgctgatagagtttctcttcttttatttgttctttacttggttcaagcagtagcgacatgaatttccctccaatttttcacgatagactggaacaatgtaagaccgtctgcgctgccgagcagttcatcgaccgcgcgctccgggtgaggcatcatgcctaatacgttgcctttctcattcacgacgccggcaatgccgctgacgcttccgttaatatcgccgccgtatgtgaaagcgatttgattgttttcttttaatctttcaagcgtttcgtcatcacagtagaaattgccttcgccgtgggcaacgggaatcgtaattgattgtccctctttgtaggaagaagtgaacattgtttcaccgttctgcacgattaattcaaccgggcggcaaatgaattttaaatctttattgcgtctcatggcgccgggcagcagaccgagctcctgcaaaatctggaatccgttgcagacgccgagaaccggttttccttcagcagccgcttttttcacggccggcatgatgttggcgaatctggcgatggcgccgcatctcaggtagtcgccgtaagaaaagccgccggggatgagcacgccgtcaaatccgtcaaggcttgtttcctcgtgccagacatactccacttcttcgccgagttcgtcctttacggcgtgatacatatcaatatcgcagttagagcctggtaacacaatcaccgcaaatttcactgtgcgacaacctcctcaacttcatatcggtagtcttcaatgactgtattggcaaggagcttctcacacatttctttcacgagttcatcaagatcgcggtctgatttttccagcgtcagctccatgtattttccgatgcgcacatcctgcacttcattgtaggtcatgctgtgcaatgcatgctgcaccgcgcttccttgaggatcaagcacactttcttttaagctgacataaactttcactttatacattatgaaatgcctcccagtcttttgaaaatctcttcatatgcgtcggttaagcttcccaggttccgtctgaacaaatctttatcgagcttttcgttcgtgtctttgtcccacagacggcacgtgtcaggagaaatctcatccgctaaaagcacccgtccctctgcgtctaagccgaattccagcttaaaatctattaatctgacaccgcagtcttcaaaaataagctgcagctctttattcacctgtcttgtaattgatttgatcgtttccacctgttcggatgaagctgcttttaacagccagatatgatcttcggttatgagcggatcaccgagtgcgtcatctttatagtaaaattcgataatcggctgcggaagctctgttccttccgggatgccgaggcgtttcgacatgcttccggcggcaatgtttctgaccacgacttcaagcggaacgatgcttacttttttgataagctgctctgattctgaaacacgctccacaaaatggttgtcaattcctttggcgtgcagatgtttgaagatcaggcttgaaatttcattgttcagacggccctttccagtgatctccgcttttttctcgccgttaaaggctgttgcggaatccttgtagaccacacggagaatctgttcgtcctcagtttgataaattcgtttcgcttttccttcataaagaagattacttttcacaatattcacggaaggcctcctaacccgaatgttgggaatattcaatctatggcggctgaagaagccgcctccggctggcttcttctataaacctaaacgatcaaagatcaagtcgacgtttttcaaatgataattgtagtcaaagcaatcggcaatctgttccggtgtaagacgggacgtgattttttcctccgcttcgacaagctgacggaacggcacttgtttttcccacgcttccatcgctttcggctgaaccgtgtcatatgcttcttcacgaggcagacccgtgtcaattaaagcgagcagcacgcgctgagaatagattagacccagtgtgcggtccatgttgcgtttcatattttccgggaataccgttaagtttttgacgatattgctgaaacggttcagcatgtaattcagcgcggttgtcgcgtcaggaagaatgatgcgctcagctgatgaatgagaaatatcacgctcatgccataacggaacattttcgtatgccgtcagcatgtatccgcggatcacgcgcgccatccccgtcatattttcagacccgatcggattccgtttatgtggcatagctgatgagcctttttgtccttttgcaaaaaactcttccacttcccgtgtttcactcttttgcagaccgcggatttccactgcgaatttttcaatgctcgtcgcgatcagggcaagtgccgccatgtaatccgcatgacggtcgcgctgtaatgtctgagtggagatcggcgccgctttcaggccgagtttttcacagacatactgctctacgaacggatcaatatttgcatatgtgccgaccgctccggaaagcttcccgacttcgattccttcttttgcctgcttgaaacgttcaaggttgcgtttcatttcttcgtgccacagcgcgagcttcaggccgaatgtcgttggttctgcgtgtacgccgtgtgtgcggcccatcatgaccgtgtatttatgttctttcgctttttcttttataatgtcaacaaatctctcaatgtccttgagtaaaatctcattcgcctgttttaatagataggaaagagcggtatccacgacatctgttgacgtcaggccgtagtgaacccattttctttcttcgcccaatgattctgaaaccgcgcgtgtgaatgccacgacgtcatggcgcgtatcctgctcgatttctaaaatgcggttaatgtcgaaagacgcgttttctcgcatgactttgacgtcttctttcggaatgacgccaagttcagcccaggcttcacaggctaaaatctcgacttccagccatgcctggtatctgttttcgtccgtccagatcgcggacatttcaggtcttgaataacgttcgatcattatgctcgtcctccgtctcttttcatccatatgttcgtgatgtcctgaatccatttttcatcaggctcccgcaaaaatgtcatatgccccattttgcggccttttttaatctcatgttttccgtacaggtacagtttggcttcctttaaaagctccgtatgctcctccgccagcttcacttcgtcaccgagaagattcaccatcattcccggtttaagcagatcggttctgccgagaggaagtccgcagaccgctctgatgtgctgttcgaactggctcgtttcacaaagatcgagcgtataatgccctgaattgtgaggacgcggcgccaattcattaatcaaaaggtctccgtcttccgtgacgaacatttccaccgcaagcggcccgacgagctccagtttctccgcgagctgaacggcaagcgcctctgcccgcttttgaaccgtttcctccgctctcgcgggcacgatgctttggaacagaatattatggtggtggatattttcagcagcgggaaaggttgaaatctctccgtgcaccgatctcgtcacgataacggaaagctccattcggaatgacacccagctttcaagtatgcacgcgccgttttctaacagtgcggccgcttcatctgtctgtccttcttccttaatgacaaattgacctttgccgtcatatccgccccggcatgttttcagcaccgccggaagacccaatgactgaacggcttcctcaagctcccgtctgctgtttacgatccgataaggagcgacctgacatccggctgactggatcgcctttttttccgtttccctgttttgggtgatgagcagcagctcgcttccctggggaagatatgcatgttctttgagccagttgagcgcctcgtaatcgatattttcaaattcgtaggtaatgatgtcactgactccggccaatttttgaatcgcttcacggtcattgtactgggcggtaatctcaatatcggcgatctgtccgcatggcgagtcttttacgggatcgacgactgcgactttataccccatctgttttgcggcgacagccatcatttttccgagctgtccgcctccgataatgccgatgacggcgccgggaaaaatcgtttttttatcagacaagctgatcactgctttccagcaccgtttgttttgtcgcatttcttctcgcctctagtttatccgcaatgtcatcgtcaaatgccgacaaaatttgcgcggctaacagacccgcgttcactgcgcccgcttttccgatcgctgtcgtcgcgaccggcacgccgccgggcatctgtacgatagacaaaagagaatcaagcccgttaagcgattttgtctgaaccggaacaccgatcaccggcagtgtcgttttggccgccgtcattcccggcagatgcgccgctcctccggctccggcaataatgacttttaagcctctgctcctggcgctttctgcatattcaaacatcaaatcaggcgtccgatgcgcggataccacctgtttttcataaggaatgtgaagttcgtcaagtatgtcgcatgcatgtttcattgtctcccaatcggaggtgcttcccatgatgattcctgctagcggctgcattctgttcccaccttctcatgctttgtttttcagaaaaaaaagcccggctcgtattgcactatgaggaagcaatacaaaccgggcatggcgcgtatcggcagtcgttcgcttctgcgatatccatgtcagctgtttatcactttcctgcatagtccggccgtttacggcagccgggtagaaacttatgggccatattcccaagattatatgaggtcgtgttttgatttcatgtttatcttaacaacggacttggataatgtcaacgacattatcgaacgatataaaaattctttcttttaatgttcgtgtttagatcaatttcccttcaaatacgatttttctcccgcaaggaacgacttgaattgatccattttctttcttttctgtaaagatcggctcttccatccgccggacgggcatatacccctcttccttcattaaagcgagaatggtgtcgatcgtttcatgttccgttacttcaaaccgtttcttttttggctttgtcattccttaattctcctcttcttcactgctttcacccagaatccgccgtggatcgttttcggctcaaaggcgatgataaacgctttttcatcaagcgttttaatcgtatcataaagctgaagctcatatttgcgcggcgtcagaatctgcatggcggtccggtctccttcaagtccgcccgccacccagcttgtgaccccgtatcctttttcccggagctgtttcggcaggtccagatcaagctctttcgtaatgacgttgactgtaatatagccgagcgccagtttttcttcaattttcatacccactatgacgccgaggccgtagccgagcgcataggcaatgacgttttgaatttgattcagattgccgagcacgagactcaagccggtcacatacacaaggatttcaattgtactgatgcctgcggcgaaatagcgctgcccctttaaggtaaggatcatcctgatcgtaaaaaaagagacatatataatgttaatgatgagaataatgagaaccatacctatactgttggataaaatcgtctgcatcattgattccccctcctctgatctttgaaaaaactgaccgggacggccgcgtcaatctttcaggttaaggatagtttaccctcttttgatcattttcaaaagaaaaaaaagcccgccccggaaggcagactttcaaactcttatcagtgaagctcagcttttttcaatcgtttgacggcttcatattccttttctagttcactcagcgtatatccggacagttcctgaacatggttttgataaaaccctgaacggatcagctttgtcctcagatgctgttttttccgattaatggcttctcgcaacaacggggccatcctcatcatcctttccgaatcataaagattaatgccgttttcaacttgctgttgctcccatcatatatcggccggctgctcaaaacaacacgctttattagaaatatttgtaaacattgtgaaagacaaatttcgacttataaaggaatcagtgaggcggtaaagtactctgaaataagcggccatgtcacagccgtaaaggcgagcatgatgatgaccgccgcagaaatacagtacatcacgtcagccgcaggcttttcagccgatttgtacaggatctgcacaaactggaccattgccgaggcggccagaaacaaggtcagggccgtaaacaccacggtgatgaccggcagattcaatatcgcgaaaatcatccatactatagagcaggcgacagccggaaccaaaagcgaaccgactcctgccgccgcagcccgcatcgtaattttctgtttcatcatatagcgtgatacaagccagaccgcgccggccgcagcggctaaaaagacgagcgaatacacgagtacgacggtaaagccgtcaaaaaacgtatggtgccgttccccgtaaccgagcggtctctgctggcttgccctcagctgaaaccaatttccgattgagaaaaagatactgaatacaagcattgaaataagagcatatttaaagcgggaaaagccgtcttccccaacgacctttaccggtgatgtcaaaatgcgcagcgcgaaacggcagtaacgtttgaccgcagcccaagcagaagcgagtttttccgtaaaagccggagccgggcgccgttccttttcttttttcttttgcttttgataacgtcccgcatttctggacattctcgacagcggttcttcatcagttccctgatgctgtttttcttcttccaacgtttcttttctttcttccgtcatgtcagcaactcctatcaaaaaaatacggcggaatttgttaagcaagaaaataaaacacttatataaggtaccgaagcgtccttaaacagtcaagcggtttcttcacccggacacccacatgacgttttatcttatgtattggttttacggaataggacaaaaacaaaaaaccggctgtcctcagccggtttttccgttatttcaagaagatgaaatacagtataaagataacgaacagcccgtacataatcgggtgaacgctttttccttttcctttgcagatcattgtaatcgggtagaaaataaagccgatcgcaatccccgtcgcaatgctgtacgtcagcggcatcataatcatcgttaagaatgccggcacagccacctcgaatttatcccaggcaattttaccgagcggcgccaccatcagcgcgccgacaataattaaagccggagccgtcacattcgtagtgacaactgacagaagcggcgagaaaaacatcgccagcaaaaagagaatgcccgtcacaacagccgcgaatccggaacgcgctcccgccgcaacgcctgagcttgattcaacataagaagtcgttgtagacgtaccgagcaccgctccgataacgattgaagttgaatccgcaagaagcgctctccccgcacgcggaagtttgttttccttcatcagccctgcctgtgtcgccacagccaccagcgttccggccgtatcgaaaaacccaacgaacaggaaagttaaaatgacaatcagcatttggacggagaagatatccggaaggtgcatccatgcctgtccgaaagtcggcgcaagactcggcacactgccgacaatgtgcgtcggaaccggaatcagcccgcagatcatgccggcaaccgccgtcagaagcattccgataaacacgccgccgtttacgcgaagcaccatcagaatgaccgtcacaatgacaccgaaaaccgtcagcagcacaggaccgctgtgaatattgccgatagacaccaaggtcgatgagttcgcttcaataatgccggaaccttgcaaaccgacaaatgtgatgaataaaccgatacccgcgccgaccgccaatttcagctcgggcggaattgcattaatgattttttcccgcaatcccgtcagcgaaagtgccacgaaaataattccggaaatcaaaacgccggaaagcgcagcctgccaggaaattcccatgccgagtacgacagagaaagcaaaaaacgcgtttaaccccatacccggcgcaatcgcgatcggatacttggctatcagccccattaaaatacagccggccgcagacgcaagggctgtagcggtgaacaccgcgccctgatcaatttttaatgcttccggaaatcctttcacaccgtttaaagacaatgtcagcggattgacgaacagaatgtacgccattgacaaaaaggtcgttaaaccgccgatgatttcattacgatagcttgtccccagctcattaaactgaaaaaattgcttcaagccaattgcctccttcattctctcccatttattctgcccgttatccgccaaataaaaaacgccccaaatacattgggacgcttgactacatacgttcagtctaaataaataagaatggattatttatatcaaacgattgagattgatccgtagtcaagccatttacggtagcttggtagaaacttgcgggccatatccccgccattatacgatatctgcatatttgatttctgagtctattgtatcaatacaattttgaaaactcaatataaaaaacgaacaatcccgtttaaaaaaattagtttattcgttaattgaccaaaaatggaagacggcaaaagccgcctccctgacatcattttccgtccgcaggccgtaccggaaccgcgaatgtgatcttgccgtcacctgctaaaatgttcataaccgtttgattgacatacaaagcatatgaatcgaatgagaaatcgcgcaatgaatagtcattatcagatgaatcatccaattcaaaaacggattccatttcacccgttttaagattcgtgactttcgccttattccccttgagataatagcccttttcatatttatcaactgatgaccaagttttcatttttttcgtattgccgagaccgattgactcaccgacattcatcagctgatcttcatccgtcttgcttacattaattccgctgaattgataatcgacgatcacccgtctgccttgctgtttgatctttttgatggtgatgccgacatggtgatgtttcgtttcatagctggcgggcagttttgttttcagagggacgatttctcccggctctgattctgattttatattacccgttatgaaaagtgttttcgctttcgggtctatcggtttgctgaattgagtttggccgcgtattcttttcccgccgccgggaagattttctctgctgccaagttcaatagccgacgtcgtcatttcataatggtttcctgcatcatccgttgcttcgtaaatcgagatggcatcatttttggctgtatcgtgaaagtcaactgaatatatgagagccgatcccatcgttccgttttccgcccggatatcgaaaaagcggtataattcgttatttacattcacagctttcgttccttccagggaaactgacttttgctttttgatcgggagtgtaaagcgccagtttcccgggatgtccttgatttttgtaatgacaagcggaagcttatcaccgtctttcagccttgagccgtccgtgaacaagcgaagctggcccccgtaccgcccgtctttcatttttttcatatcagtcctgtcataatcctcagataacatattccgggtatttttataatcgacttgaaaaggaatactctcctcatctgatttcaaattgtcaacgataaagttataaacgagctgtccgctgtcgtaatatacactttttactgtaaccgtgatcccgcgtgattccgctttctcgttcagttttgtcaccagattgcttttaaacagcgcagaacctgccttatcctgaaacagactgtaaatttgtccggcaacaggaatgtttcccatagccgtattaacggagggcatgaacaagcctgaggacagatacagaaaaaacaaagcagcagcaaccgcgaagccgtttatcagttttcttccccatctccgtctgacggcgccttcttttccggcacggacagccgcgctgtgtatcacgtttttcaattcagctttcggcacgtcaatgtcctgatacaattgcttcatttgatgcttttccatatttgtttatcctccttttccagctcttgcttcaatgcttttctcgccctgtgcagatgcgtttttacggtgccttccgccatgccggtctgttcagcgatcatggaaatcgagaaatcctgaaaataataaagctgaatggtcagctgtatatgttcatcaagtgtttccagagcatttcgaaggtctatgtattcttcaacgttcttgttctccgcacatgtatcgtggtgcggctcaaacgggatgacgtcaccgtgctttttcctcatcgcaaaaatcgtattaagcaaaatccggatcagccacgttttaaaatatttcggctccttcagctgcgcgatatgaagaaaagccttgtaagccgtttcctgaacagcgtccagggtgtcttctttgtgatgcaaatagagataagctgttttatataaagtctcctgatgagctgtgatcagtttttcaaaggctgaggcatcaccttttttcgcctttttgatcaatcgttcttccttcaccttatccacctcctatgctgttagatacgaatcggggcgaaacggtttcaaaaagatgacaaaaaaaacgcctcttttttaaaaagagacgttttttatcttgatttattcccactcaatcgtcgcaggcggcttacttgtaatatcatacacgacgcggttgatgtgtttcacttcattgacgatacgtgtcgaaatcacttcaagcacatcccaagggatacgcgcccagtcagatgtcatgccgtcgattgaagttacggcacggataccgattgtgtaatcatacgttctcgcatctcccatgacgccgacgctgcggatgtcaggaagaaccgtgaagtactgccagatgtcgcgctcaaggccgtggtttgccacttcttcgcgcagaatcgcgtctgattcacgaacgatttcaagtttttcttccgttacttcgccgagtacgcggatgccaagaccaggtcccgggaacggctgacgccatacgatatcatccggaatgccgagctctgtgccgagcgcgcgcacttcatctttgaaaagagtgttaagcggttcgatcagttcaaactgcatatcttcaggaagaccgccgacattgtggtgcgatttgatcgtttgcgctgttgccgttccgctttcaataatgtctgtgtaaagcgttccttgcgcaaggtaatcgattcctttcagcttgaccgcttcatcatcaaatacgtaaatgaattcgttgccgatgattttgcgtttttgctcaggatcagaaacacctttcagcttatttaagaatctgtctttcgcatcaactttaatgacattcatattaaagccttcgctgaacgttttcatgacgccttccgcttcgcctttacggagcaggccgtggtcgacgaaaatacaagtcagctggtcgccgatcgctttatgaatcaaaacggctacgacagaagaatcaactccgccgctcaaagcgcaaagcacttgtttgtctccgactgtttcgcggattttttgcatttcgatttcgataaagttttccattgaccattcgcctttacattcacaaggaccgaagacaaagtttttcagaaggtcatttccgtattctgaatggcggacttccgggtggaactgaacgccgtaccattttttgtcttttttactcatcgctgagttcgggcagtgatggcttgtcgcatctaccgtaaacccttccggcacttgtacgactaagtcgccgtggctcatccataccacttgttcttccggaagatctttgaacaggtcaggagttccttgaatctgaatgttcgcttttccgtattcgcgctggcttgccgcctcgactttccctccgaggtaatgagtcatcagctgcataccgtagcagatgcccaatacaggaatatcgagttcaaagattttttcgtcacagcggaaagatccttcatcatatacactgttcggtccgcctgaaaggataattccttttggattcatttctttgatttcctcagctgtcaacgtatggggatgcagctcgctatatacgccaaattcacggatccggcgggtaatcagctggttatactgactgccgaaatcaagaacaagaatcatttcattcactaacttcgtcatggttgtcacctaatctcctctaagtttttgacacagaaaaaacggaggacacacgttcagccctctgtcgcgcaagacttgtccggaagcccggctttttaacgctcccgggctcccatttaacattcatttattctaacaacaggacgatatgcggtcaagactatcttgttttaattatattttcccacaactgtaccgattcattccaaagctctgcggcattatcgctgcggtataaagcacgctcatagcgcagcgtcagctcggacatgtcgtctgtatggtacgcctcatcaatcctcgcggcaaaatcacggagcgtttctccgtctcccctgctgaacccttttcgtttcagctggcggagcagcgcggcatatgcgtcgaaaaagacgtcttcatccgtgcgccgcttcaatctggctgctgcaacatgcggaatccagcgcgcccgcagcacccagacgagcgcggccgcggctgaaatcacgatgatgatagctgcatacggccacagctgtgccgcggttttattgtgcatcacaggatgcggagccgcactgtgctcccgctttttcggcgtttcttttttttcgggctttgtttcctggcgctgcttgtcagacggtgtatccgaattccccgctgagcttccgccatcttttcccgctgtatgattctgctctgacgtaaactccgtcggattggtgaagcctttcgtcggctcaaacgtcacccagccctgatccggaaaatatacttctacccacgaatgggcattgttgtttgtgacttcataaagatggccgttttgatcgcccgcgcctttatattctccggatgtatagcctttcacccagcgggcgggaattcccgcagatcgcagcagcacagccattgccgaagaaaagttatcacaataacctcttttcgtttcaaacaaaaattgatccacataatcctggttgtgctccggaacggcgacatcctgtgtatcatacgaaaatgcggaagatcccagataatcctcgaccgccttcgctttatcgaacatattatgatgatcccgcgtcagcctgtcggcaagctgtctcactctttccggaaggctgtcgggaagctgcagataccggtcattgaattgattctgctcacggtatcgtttcactttcacttttttgaggtcattcagtttaaagacgggcgcgtgaaaagtcaccgtgtaccgtcccatattgcggatgctgcccacttgttcactgatcggcgtgatttgctcggtgtttccgttcatttcaagctgaatcgagtgcttcggtttaatattggagacgccgatcggatacatgacgtgattataaagataattctcatcaatggacacctgcgccgtataacgtctcgtctgcacactccggtcaaaccatatatcttccacattgccgccattcagtttataggacatgccctgatcggtctccacccagccttttcccgtgtatgtatccttcgtttccacccggaagtacgcccgctcttttcccttccatgtgaaaaccggcgtatcgtcctgctgaaaaggcccgcctaatgtttcatcatggttgccgtagccgattttgctctcagcggcgggcacctctttgtgatttgttatttttttcagaaacggcacggggtccggccagttcggatctgatttcggagccgccagaccgaataggacggaagcgcagataaacagcgccagcggcagaaaccatttgatgatcaacctttttttaaacgctatgtgttccgtcaggcggatgcgctccatattcaaaagccccatcatcaaaaagccgataaagacaatccggatgacggcgtatgcggcatcatagggagtaaacgtatcaagcacggtgatataggccaccgtcatgataaaaaagaataatattttccgctgatagatcacccagtaatgcagtaaatatacgagcagccataatagcacaaaaaacagcaatgtgcggaatgacgggttcatatcattccatcttccggtcccgatgtgccgggcattcagcatcacgtcccgcaaaaaagaagcgagccattccggctgaaaaaccgaacctttataaaacagcatatgaatactgatcaacgtaaacagaatgcaggacggcacggtgacgtaccacctcatccggaagaatgacagcagaaatgccaaaccgataaaaatgatgaaaaaaccggtatgttttgtatccgtaaaattgtgcagcggcctgagccattcccataacaataaaaaagcgagaaaataaaacagcagcagactcagcctgcttccctggttctcgtcatgcggcatggcgcgccacctctctttctaaacaacatgggacacccgtttgtccctgatcatttgcaccttgatattcttctgagcgaagatgagagcgagattccgttctttttccgaaagcacggcattcgtttctttcgccaaaaacaccgtcatgtcaaaaggtcctgcctcagcctgtttgagaagctcttctgtaaggctgcccgtcacgacggcaataaaagctttgcggacacgcggatctgccagctcttttcttaagcgtccgccggcatcagcttcttccgattctgaaactgcagccagataacgcagcacatttctgaaatgctgctctccctcccggacgggaaaaacagtccggtcgttccccaatgaaataaaccccgcgggagagcccttcacaagcgccgtgtaaagcagggatgccgaggctgagaccgcggcttcaaacgaaggggacggcgtgcagtccaaaaggagaaccatattcatactctgcaaggggtcaaattccttcgtcatcagctcattgcgccgcgccgatgttttccagtcgagtgcggaaaaccggtcgcccggctgataatttctgacgctcgcggccattgcggagcggtgagtctgaaacggcgcgccggcacccgcaccctcttctccggatacggtctgcgtcttataatgtacagacccgtacgccgggaaaactaagaccgtatccgttaccgaaaacgaggccgtcttgtccaaaagcccgagaacatctccggtccgcactcttatcgtatgtaaacgatgctctccgcgcggagcctgcggcagctcatattgaaacgtcagctttttttgaaaccacggaaacacgagctgtttcgcacagcgcctctcgccaagcgtttccggcatcacatcttcaatgaccatataagtcagcggaaacggcaggcgcctcgtcagcctgatggtgacagacagcctgtcacccgaggttaattgagcagaagaaatctcacgcgtcacccgaaacgcccgcagcggatacacagcgaccagcccggcgtaaacggtaaacggcaaaaacgcataaaataaaaaccagctcacaaatccgccctgaaacatggcataagaaaagaccgctgccgtcaatacggccaaaataagcagcttccagccgtatagcagccaatgcactttctttctcattatcggaccgacatcctttgaacgggaactttttccgtctgcatgatgtcttcgatcacagcttccggcgtgacatcattaaatttcgcctcggccgttaagatcattctgtgaggcagcgtatacggagccaaatactggacgtcatcaggaatgacgtagtcgcgatcatgaagcagcgcgtatgcctgtgcggctttcattaatgaaatcgaaccgcgcggacttacgcccaaatgtacggacggatgccggcgggtatgctgagtgatgccgacgatataggctttaatgccatcatccacccgcacctgctccagcttttgctgaagactgataaattgttctttagaaatgacgggctcaattgtttcaagcggattgcgcccttcctgcaaagacagaaccttaagctcctcctcggcagtcggatagcccatcttcagcttaaataaaaaccggtcaagctgggcttcaggaagcggatatgttccttcatattcaaccgggttttgtgtggccatgacgaaaaacggctcagccagccgcattgtctttccgtcaatcgtgacatttccctcttccatcgcctcaagcaaagaagactgcgttttcggagaggttctgttaatttcgtcggccagcacgatattccccataatcggtcccgggcggtattcaaattccatcgttttcgtattataaatagagacacccgtcacatctgacggcagaagatccggagtgaactgaatcctcttaaagtcagctccgatcagcttggccaaagcgcggaccatcatcgtttttccgactcccggcacgtcttccagcagcacatgcccttttgcgagaatggcggccaagctgagtatggcgatatcccgttttcctatgatgatgttttcaatatgctcaacggctttctccagcagcggatgcagctcttctttataagccattcttctcctcctagtcatctctcaaatttcaattatcgtaacctaactttaccacaaaatataaacagtataaaaaaacgtttccagcgaattgtttccagtccgcaaaaggaaaaaagctccctttagaaaggaagctttatttcagctggagaggctccatatgaacatgtgaatggtcgatggcatgttcatctttcatctttcgttctacctcatttgcgatatcatgactctctttaatattcatatcagacggcacttcaatgacgacatcaatatgaacggagctgcccagatatctcgctttaatatcttttaaacggctgacgcccgcaatctgttcgatcgtctttttataatcagaaatatttttgacatcaaaaccgtcagtcagcgaatgagaggattctttgaaaatatcccacgcggttttgcagatgatcaatccgatgataaacgccgtgaccgtatcaacccaagccaaatggaactgcgaagcaaaaattccgataaacgtgccgatactgacgagcgcatctgatttattatcagcagccgcggctgaaagggcttggctgtttacctttttggcaagcccttttatatagcggtagacaatcagcatcacgacggcgctccccgcagccgtccaggcagcaatcatatccggtgtttcctcttttacggaaaaaatagattgtgcggcgctgaacagcacttgcattccgacaagcatcataataatggaagcgataagtgacgcgacggtctccgcccgaaagtggccgtaaggatgatcttcgtcaggaggtttctgagagatgcgcaaaccgatgaaaacagcggcagatgccacgatatcagtcgtgttgtttaaaccgtcggcttgaagcgcctctgagtgaaacaaatagccgatcacaagcttcacagccgacaatactgcatatgcggcaatactgacaatcgctccggtttcgccttttttcaattcatgatatctctccactgaaaaccctccttcccgttcattttttccttcattatcatacaaagcgaaggcacagtgggtctatagaaacatgattcactttccacagaaaaatagtaatcatagaacatttgtgcatacaggcaaattatttttattcacgaaaccccagtcatcccaatcgtaccaaggcttcttgccgctctgcttatatggaattattttcaataccatcaaaacatataaatcacagaaaattatttcttttccttctgctgtacgaacgagaaaaaatgtcatattttcttacatcattttcaaaagtcatatgtatttatgataaaataaaacttgtcggaatattcagcataaacaaattaaaaggaggcaaagaatgaatcagcctaattctttatcgaagggattaaaaacccggcatatgacaatgatttcaattgccggcgtgatcggcgccggattatttgtcggaagcggatccgtcattcattccaccggacctggagcaattgtctcctatgcattagcaggactattagtgatttttattatgaggatgctgggggaaatgtcctccgtcaacccgacaagcggttcgttttcacagtacgcacatgacgccatcggtccgtgggccggttataccatcggatggctgtattggtttttctgggtcatcgtcattgccattgaagcaattgcgggcgccggaatcatccagtactggttccccggcattccgttatggctgacgagtctgcttctgaccgtgctgttaacactgacgaatatttattcagttaaatcgttcggcgaatttgaatactggctttccttagtgaaggtggcgactatcgttgtcttcttaatcgcgggttttgcgtttattttcggcctcgtccccggcagcaaaccggtcggacttgaaaacctgacgggcaacggcggatttctcccaaaagggccaagctccgttctgctcggcatcgtcgtcgttattttttctttcatgggatctgaaatcgtcgcaatcgcagcgggagaaacgtcaaacccggtcgaatccgtaacaaaagcgacccgctcagtcgtttggcggatcatcattttttacgtcggctccattacggttgtggtcacgctgcttccgtgggattcagccaatgttctggaaagccccttcgttgccgttttaggccatatcggggttcccgcggccgctcagctcatgaatttcatcgtcctgacagccgttctgtcctgcctgaactccgggctttatacaacatcacggatgctgtattcactggcagagcgtaatgaagcgccgcggcggtttatgaaactgagcaaaagaggcgtaccggttcaagccattgtcgccggcacctttttctcctatattgccgttgtgatgaactatttttctcctgactccgtatttttgtttctggtcaattcatcaggggcaatcgcactgctcgtctatctcgtcatcgcagtctcacacctgagaatgagaaagagaattgaacggacaaaccctgaatctcttaaaatcaaaatgtggtgctacccatacttaacctacctgacgatcatcgctatttgcgccatcttgttatctatgctgtttatcagctcaatgcggtctgaatttctgctgacaggatttattacattagtggtccttgcctcatatgtattccacaaaaaacaaaaaccgaaagagaacgcttccgcaagccgggttgcgcaataaccgcaaacacccgccctcaaaaaagggcgggtgtttttttaaccaacctgttccagacagcattaactgtagtacaggatttcaataaatgataaggacaggatgaataatggcacttgaaaaatttgcagatgaactgccgattatcgaaacactgaagccgcagaagacatcaaacggcagcacgtattatgaagtcacgatgaaggaatgctttcacaagctgcaccgtgatctcccgccgacccggctgtggggctataacggtttgtttcccggcccgacgatcgacgtgaaccaagatgagaacgtctatattaaatggatgaatgacctgccggataagcattttctccctgtggaccataccattcaccattcagagggcggccatcaggaacccgacgtcaaaaccgtcgtccatttacacggaggagcaacgccgccggacagcgacggctatccggaagcctggttcacacgggatttcaaggagaaggggccttattttgaaaaagaggtataccactatccaaacaaacagcgcggggcgctattatggtatcacgaccacgccatggcaattacgaggctcaatgtgtacgccgggcttgccggcatgtatatcatccgcgagcgaaaagaaaagcagctgaagcttcccgccggagaatacgacgtaccgcttatgattatggaccgcacgttaaatgacgacggttccttgttttatccgagcgggcccgataatccttccgaaacgctgccgaatccttcaatcgttccattcctttgcggaaataccattctcgtcaacggcaaagcgtggccgtatatggaagtcgaaccgcggacatatcgtttccgtatccttaacgcctcaaatacgagaacattttccctctcgctcaataatggcggccggtttattcaaatcggttctgacggcggactgctcccccgttctgtcaagacacagtccatcagcttagccccggctgagcggtatgatgtgctcattgatttctccgcttttgacggagaacatattattttaacgaacggcaccggctgcgggggcgacgtcaatccggataccgacgccaatgtgatgcaattccgcgtcacaaaaccgctgaagggagaagacaccagccggaagcctaaatatctgtcagccatgcctgatatgacatcaaaaagaatacacaatatcaggacgcttaaactcacaaacacgcaagacaaatacggccggccggttttaacactcaataacaagcgctggcatgatcccgtgacagaagcgccgcggctcggctcaacggaaatctggtcgattatcaacccgacgcggggaacccatccgatacacctgcacttggtttccttccaagtccttgaccggcgtccttttgacttagaacgttataacaaattcggcgacattgtgtatacaggccccgccgtcccgccgcctccaagtgaaaaaggctggaaagacaccgtgcaggcgcactccggagaagtcatcagaatcgcggcgacattcgcgccttacagcggacggtacgtatggcattgtcatattttagaacatgaagattatgacatgatgagaccgatggacgtcacagaaaagcagtaatccccctttttgagaaggggcttttttatttatacaaaaagaaaaaataaggatccgcttatttgcatatactgtaataacaggaagacggtgcaccctcattggaaatatggatagaaaaaggaattaggagattagggaaaagtatgagacaatgaaggtgtgcacgaaaattcataagggaagaagtgactttatgtcttactacaacaaacgtaatcaggaaccgctgcctaaagaagatgtcagtacgtgggaatgcacaaaagaggactgtatcggctggagcagaaagaattttgccggcagtgataccccgacttgccccctttgcggcagtaaaatgatcgacggcgtccgttcgttggtgaatctccaaaacaacagtcaaacggcatcaagttagacctcccttttacgagtctcaacatagagaaggcctccatgtctcatgagaggcctttgcgttatcatgtccttttacgatgcaaaggagcaatgaacatgaaaaacgatcggcagcagaaagatctcaaggaaatggcaaaacagcagaaaatgaaccttgccgcacagtcattcatcgaatcactccattttgccgttccgattctccgttttttcaaatggctcgcctcagccgcagccagctttgttcattaaaaaacacccagcgggcgctgagtgtttttttcatgattggataacggaaaaactgttgataatgccattgtcattttcccagactttttcacattttttcgtatccaaatgataagcataaatggtcctgaccttcgcgttccgtcctgtttcatccttcagacgcttagcgcctttggcttccgccatgaaataaatgatgctgccgtctttagaaaactgaggctgggcatcaatcagcggagtgaaatccttcccgtttgagataatcgtttcatcttttttcgttttgacattcatcagacggatggacgctttttgttcagtccctttttgtgtataagatgtaaagacaagatttttgccgtccggtgacatcgcgatgtcgctgataaactgttcaaggtttgtcagatcctgaaggtgatcgcccgcccctgccgcaaaccgtatattcgtcggttcagggtcaacccccttctcatttgcctcatccgtttttttataatcctctttcacggaataatgcagcagcgcaaaatcgttttggctgcggttataaaagaagccgctcacactgtcgtctttctcatccgccgcagggtacaggttttgatagcgtttcgttttcagatcaaaagacgcgagacggaaaatatcttcatccgcttttccgagacggaaataaatgtgcgtcttatccttggataaaaacagactgtcagcgcttgccgatcctttataaagcaccgtcttctgtttcgtcttcagatcaagcttatacagacgcatctcattctgatcattattaccgacataatagagcacctgatgggcgtcatccagcgcaaacgccggatatgccgaaagcttttcctcgtacagcatacggccgtcttcgtaatatttcgtcatcagatctttgtctgtaatggaaacaagcagcttgtcatggccgccggagacaacggcttttccgcctccgtcgctttttcctttgatcagtaaaacggccgcgatgaccgccgccgccagaacagcggctgcgaggatccagatccatcgtttcttattcattatcaatctctccgtcaatcagaaaaagcaagaatagtctccttgctttttctgatggtctattttaatagctgtaatgtccggatactcttcctttgcttaacggatatccgagcgctttgaacgctttcgggctgacatccaatacggcattcggcagacggcctacatcatttttatatactgtgataacctttttcggttttgctttagcataagctctgattttcgttccgtttctcggaacgtcaaatcctaattttgtcgcgcaatcccaatgtcccagttttttaccggaagatccttttttaccgactccattataccatgtaatatttccgttcacttttttagcacttgcatcagaagagtaactgatcgctcccagcgtacttcctgctaaaatcaataatgctaagaataacttcttcaagctttcgtccccctgattctttattctaggcaaaattatacaccaagaagacgattataatatttcaatcactttacatgttcattacaacgcgacggagacacgcacacaatattgacacaatttccaattctatataatcccatggtaaattatactacaaaatttaattcataagcgttataatatccctagagtatttctgcattcaatatggactttttataaggcctattgatagttgcgtaatatgatatattttgagaaatcaggctttaggaagcactttttttccttttaaaccgtggttcatattgatcatgtacctatactcgtttccatcagactaggagtgataatcaatgaaagcggcaagatggcacaatcaaaaagacattcgaatcgaaaacattgatgaacctaaagcagaaccgggaaaagtcaaaattaaagtcaaatggtgcgggatttgcggaagcgaccttcacgaatatctgggaggtccgatctttattccggtcggcgaaccccatccgttaactaaagaaacggcgcctgtcacaatgggtcacgaattctcaggagaagtcgttgaagtgggcgaaggcgtcaaaaattacagtgtcggcgaccgtgtcgtcgtggaaccgatttttgccacacacggacatcagggagcctataaccttgatgaacaaatgggattcttaggcttagcgggaggcggcggcggattttctgaatatgtgtccgttgacgaagaattgctgtttaagcttcctgaagagctttcttatgaacagggcgcgcttgttgagccgtcagcggtagcgctttacgccgtccgtcaaagcaaattaaaagcgggcgacacggcagccgtttttggctgcggaccgatcgggctgcttgtgattgaagccctgaaagcagccggcgccacagatatttacgcggttgaactttcaccggaacgtcaggaaaaagcgaaagaactcggcgctatcatcatcgatccgtcaaaaacggatgatgtcgttgaagaaatcgcaaaacgcacaaacggcggcgttgatgtttcttatgaagtgacaggcgtccctgtcgttctccgccaggcgatccagtcaacaagcattgccggtgaaacggttatcgtcagcatctgggaaaaaggagcggaaatccatccgaacgatatcgtcatcaaagaacgtaccgtaaaaggcattatcggataccgtgacatcttcccttccgttctcgcactgatgaaagagggctacttctcagcagataagctcgtcacgaaaaaaatcgtgctcgacgatctgattgaagaaggcttcggcgctttaatcaaagagaaaaaccaagtaaaaatcttagtaaaaccgaattaaaccgttcagcaaaataaacagacacatccaaaaagagccgttcaggctctttttttcgtcccttcgtctttccttccttttccttttaaaaatgatccgctctgcgcaaactatttttcaccctgttccgtctatccataggtaacagcctatgatacgtatttttaaaaaaggagccctttaaagcaatgaagaacgaaacagccaaagcgtcgcttgtgacgtgcataactgagcgcaaagaagacttttaccgcctggcatacagttatgtaaagaacaaggatgacgcgttagatattgttcaggaatcaattcaaaaagcgctgacatcagtcgaatccgtcaaaaaccccgatgtgataaaaagctggttttataaaattttagtgcgtacggccattgattatctccgcaaacagaaaaaacttaaagtgatggacgatgaaacgatcgagtttttaagccgcggaaaggaagatcactacaaagacacggaccttcatgaagcgcttgacgacctgccgcatcaatataaaaccattatcattctgcgtttctttgaagacttgaaattagaagagatcgcggacattacgggggaaaacatcaacaccgtcaaaacacgcctttacagggggctgaagctcatgcgcattcagctgacgaaggaggatctttcttaatggaaaaaagattagaacaattaagagaagagtataaaagtgtgcccattcctaaagaactggacagcattgtcgaaaaagcccttcagcacaaaccgaagaaaaaacgaatcgtgatgtggccgacatccgcggcagtcgctgcggccgtcttatttaccgccgtagtcaatatcaatccggatgccgcacaagccatgtctaaaatccccgtcatcggcaaagtcgtccaagccatcacattcgtggagatgaaagaagaaaagaaccaatcaagcatcgatgtgaaaacgcctgctctgtccggcctttccaatcatgaacttgaagacagcatcaaccggcattatatgaaagaaagcaaagagctctaccgggaatttatgaaggcgacctcaaaaagcaaaaaaggccacctcagcatctacagcgattatgaaaccgtaactgacacatcggatctgatctcagtccgccgtgatatcgaaaaaacccaggcttcatcttatacccaaagccgatatatcacgattgataaaaagaatgaggccgtgcttacgttaaagagcttattcaaagatgaccgttatattaaagtcatcagccaaaatattaaagaacaaatgaaaaaacagatgaaagaagatccgaataaaatatattgggtcgaggaagatgatatgacggagcctttcaaatccattcatgccgatcagaatttttatattacagatcagcacaaacttttcatctcatttgatgaatacgaagtagcacccggatatatgggcgttacagaatttaaaataccgacctccgtcatctcaaagctgcttgtcggagaccgctacatcagataaagaaagaaaaaaatccatgatatccgcagatcatggattttttctttttccccggcaacagccgcttgcacaggggaaccctttcatataacagacgccggacgagggctgaaaagtttaagaaaatcacaacatttcattcattttttctgaaacaaaatccccttccgaatgcgtctatctaacggaacaaatggaagactgtacagaaatctgccataaccatccgcaaaacagcgagaatttccgcacacattattggaggaataccatgtcagacaagtcactgaatcatcgctatattcccggactggatggacttcgcgcctttgccgtcctcgcagttatcgcatatcacctgaattttaattgggccgacggcggtttcattggtgttgatatcttttttgttttatcggggtatttaatcacatctattatattgcctgcccaaggcaatgacatcacccttgatttgcgtgatttttgggtgcgccggatcagacggcttctgccggcggcttatctcatgattatcacgacagtcatttgggtcgtattatttaatagcgagctcctgcataccatacgcggagatgcggtctcctcacttttttacataagcaactggtggtttatctttcataaactttcttatttcgacagcttcggctctccttcgccattaaaaaacctttggtcgctggcgattgaagaacagttttatatcatatggcctttcctgctgcttgcaggaatgcacatatgtaaaacacgggcccggcttgcggcagcggtcacattcatcgcgttatgctcagcagtcgtgatgagtatgatgtatgtccctggcggagatccgagccgcgtttattacgggacggacacccgatcatttgaattgcttatcggctgcgctttagctttagtgtggccgatgaaacgattatcttccaaacggctgccgagcagcatgaaacacctgcttcacgggacggagcttgccgcttttgccgcgctgttgctatgcgtcttttacacggatgaatatgaacccttcctgtacaagggcggcatgcttttgatcagcatcaccgcagcggtccttgtcgcatgtatatgccatccgagcagttttttgggacatgtcctttcatggaaaccgcttcgctggatcggaacgagatcatacggaatctatctttggcattatccggttatcgtgctgagcacacccgtgcaggaaatcggaaatccggtttattggcattgtgccgtcagaatcggcgccactttcattcttgccgaactttcttatcatttcattgagaaaccgatccgcactgcgggcttcaggccttttttccgccgcgtgtttttgaaccgctttctggaatggaagacgtcctctgtcatcagcagaatgtcgctcggcctcattcttgccgccatcctcgtatttgcgggcgggctgtcaggaatagccgaggagaaaaaacagccgcaatggacatacgcgcaaagcgggcagcaagaaacagccgcctcttcacacaaaacggctgatcatgataaaccggcaaaagaagatgacagccagaaaaaatacggcggcgaaaaaacagacgccgcatcagacaaaaacaagaaagaatcaacaggcaaatcagatacgaagaaaaacgaagacaaaaaagagcaatcatctcaaaaaacggctgattcaaaacaaacacagccaaaaaaagaagtgctggccatcggtgactccgtgatgctcgacattgcgtcatacctgcggcagtccctccctcatgtcaccatcgacggaaaggtaggaagacaagtctctcaagcactccagctcacatcggaatacgcgtcatttaatcagccgaacaaagcggtcatcatcgagttagggacgaacggctatttcacaaacagccagattgaatcactgatcagctccttttcaaaagctgatatctatcttgtcaatacgcgtgtgccgcggcagtgggaaagcaaggtaaacgagtcattgcgccagcaggccgaatcacgcaagaatgtcacccttgtcgattggcatgcaaaagcattgcagcaccctgaatactttacacccgacggcgtacatctcatccctgagggatcaaaagcgctgacatccctcatcgtccaaaccatgaaatcatgacaaaaaaagaggcctcaaaaggcctctttttcgtatatcgtcaggcaagcttctgtccgcaattcgggcaaaaattcgcgccttccgttttcgttccgcagttcggacagaatttcggcttagccgctccttctgagccatttgccggtgccgtcccctgattctgctgattttgactttgctgcggctggttctgctgattttgattcatttggttcatcatttgatttgccatattcattcccatcatcatgccggccatatcggaggctgtgccgcttccgctcattttgccggatgacattccgtccgtcatggaaatctgctgatagcgattcacatcgcccaccatgccgtaagaagcgttcttcgtaatcatatcctgaacttcctgcggatagttaaagctcatgatattgaagcccgtaatcgacatcccgtctccgatcagctgcatatcaagatcttcttgaatcccttttccgatttcaaatgaattcgactgcagattgaacatgtcttttccttctctggtgatccatttcatcaaaagctgatcgagaatagacgtaatccggattttaatgtcctctactaaatagctgtctttgacacccgcaatcttatcaatcaatccgatgtagtcaatgaccttgaagttaaatgtaccgtttgcgcggatcggcataccgcccggcattcccgccgccggaatgttgatggcgttttttgtgccccacttcacggtgaactccttcgtattcacaaacagcacttccgcccgcatgccgctgttaaagccaaacttaaacccttttaacgtcgatagaaacggaatgatttctgactcgatatcataatcgccgtcatcacggaagatcccttcaatcttcccgttgtgtaaaaagatggcatcctgtcccggccggatgatcagacggctgccttttttaatttcacggttgttccatttatagaaaaccatgtcgtctctgaattcttcccattccaccacattcgctaactgatttctgaaaaaacccatgtatgctcaaatcctttacgtaaaatttaaaaacttcctttgcttccgctgtaagacgtgccgcccctcgtgactccgccgtcattgtcattatctttgtcaggctttctttctcttgtaacgtccgtccggatatatgtgtcgtgctggtccagcacttcagacgtatcgtgatccatatacgtgctgccggtgacggtgaccctgccgccggaattgtacaccatcacagtgacggcaattccggctgcggctgcggcgataatcagctgaaaccaccacgtgagcagcagattgtcagacttgttctcagggtttttccccatatctttgtaggacattttaatataagtctcaaacgccttttcgtaatggcctgcggaaatgtctgacgaaatcgtattcctgatcgtattcagccggctgctgttcaaatacgtctccgcctttttgtatccggagataaatacttcccgatctttcatatcaatggtcaatatcgccgtgcttccgtgaaaatgactgtcataaaaatcaccggcgtactgcgcgatgtccttaccgcccgttccgtttgcggtaagaataataaaatcggtatggcgctttgcccccagcttccccgccaattcctcgagtttcttagtttcatccttcgttaataagtgagcattgtcataaacatattgcttctgttcagcggcagacgctgatgtatgtaaagaaaaagacagcatcagaaaaaggacgaagcaaaagagacacgctttttttatcgatactttcatcaaaaaccgccccctatcataagtgagacgagtcttaatgctaaaaacgtgccggctgtaatgccgccgaaccacgcggccacttttccggcgctgatcggcggtttgccgacaaccttgcccgtctgcccgttcatcgcaaaaatgtgctcagtccgctcataatcatagctgaccatccagaccggaagaagcacgtaaaaactgctgagtttatccgtctgaatcttttcatctgtaatgtcagccgtcgtatagccggagaaggtggatctgatataagaatcaatataatggctgattttatccttcgcccgcggaaagagatcgtcatcggtataattgtacttttccgctatatatcccgccaaataggctgtattaaactccttcagctcactgtaagaataaggctccagtttgtccattaattcatcattcattttttctgaagcgtcgaccggaattttgagataatcaagattaatatcgcggtacgcgttgtaatactcggtctccgtcacccggtattctccatcatcatagtgatgcactctcgtacaaacggcattgacctgaaccttgctgtttaagtcaaacatccaaaacggcacgtacataccggttatgttcttcacccgatcggcattcataaatcccttaggtgtcaggcggccgtttctgcaccactttttaaaagcgctcatggcctcttctttgctgatcgtaaaaggaatcaccatggaaggcgcgagatttcccgataatcgatcggcgagaacggccgcacctccgcaaaacccgcacatcgttgcagtcgtctccgcctcagtcattaataccgcgccgcagttctcacagtgatactccttcgcctcattttcagaaaatctggtcgtaatatactctttaggcaggctttctatttgatcctgccgcccgcagctgcggcatgtcagcttgccagatgaactgtcaaagaccatatcatcgccgcagttcgggcatttataagaaatgatcattctgtttctctcactttctctttatatcggacaaagctcagcccgctgtctattgatctttactgaaaagcattttctgcttgagcgccgccagttcatcatcgacactgctttgattgctgtcatatttagccgtcagctcgtcaatatcgtctttcggagacgcattcagctccgccatcgcattggcatgatcaagcgcccggttgaccttgtcttccattctatcgaaagctgtcatcgattggcccgcatttgaaacagaggatcccagtttgttcattttctcctgtgtttttgccacagaccacttcgctttaatggcatttcgccgcgactcaagctccccgatatcggcaacaagcttgtcatgcatgctgcgcatttgagacgcgttggaagaagcaagctgataagccgtttgcagctcagtcagccttgattcaacggctgctttcctttccagaaatgtccgcgcatcagcttcatttccggcctgtaaagctttcatcgcgtagctttccatcttttcggcctcagcctggcattccgttaacgctcttttcgcccgctgttcctcagccatgacagaagccgtctccgccttcacttttcctaaatcactgttcagattccgcaaatattgatcaaccattttttcagggttctcagctttatccagcaacgcattaatattgcttgacataatgtctttaaatcgtcctaaaatactcatttttcattttcctcccaaaattaaatagtaacaagttcacagttatatatactggtttttttcaaaaaagtttcattttctcatgagtttatgtataaatatatgaaaaaagtctcattcagcccatttgtgccggcggatattctttatgaccaaatacaatgaaaacaaaaaataaataaacagcccgatcatcaaaccgctcactaacggataatgcttcgcagaatacacaaagaaatccagctgcgatatctgttcgggacttgtgatcgtatccgtattattcaaaagctttgaaaatttagccgtataattccaatcaaacgaatcagaaacaaactcactcccctgataccaattcacagcggcgaggcagaaaaaacaaaaaacagaaaacgcgcattgcacgataagaaaaacatttttcatgtaaagcattcctccgcggttcaatttcatatgccgtcacactatacatgacggcagcagcagaaacttggttttactccgattttataaaaacattattgtatgtacttcacattggttcaatttactggatatccctataaagtataccgtatatcacaaagggtttcagacctaaataaaaaggatgcctcctgaagtccgctgactttcaagaaacatccccgatattttacagagacacttcaacctcttttaagctcggcaaagcatcaatcgcaccgattttggtgcacacgagcgcccccaccttattggcaaatgacacaatatcacgcagcttcgcaaaatcttcggctgccgtctgaatttcatccgtgcgtgccagctgatacagcgccgcgccgacaaacgcgtctcccgctcccgttgagtctattgatgtcaccggaatgctcgggatgatatcaagatccttcccatttgaaagaagggtcccgcttttcccaagtgtcaccgccacaatgccggccccgatctcatgaaggattgcaacaccttctttatgatccttcgcaccgctgatgatctcaagctcctcatcactgactttcacaaaatcacttacggcaattgctttttttgcggtgcttataaactctgaaactcttcccttccataaatcctcgcggtagttaggatcgaaggaaacaaactgtccattgtctttcgcaatcgacatcagccgtaaataggcctcgcaaaacggatctgataacaatgccgtcgctgaaccgaaatgaaggattttcgcatcgtttaccttttccagatcaatatcctccaaagtaaacaaagcatccgctcctctgttaaaaacaaagtcgcgctccccattttgttttaatgaaacaaacgcaagcgttgtaggcgctttctcatccatgacgagcatagaagtatcgacgtgtacggcgtctaaagtctgcttcagaaagtacccaaacggatccttgcctgtttttccgctgaaagccgcgtctccgcccagcttcgcgatggccgctgacacattcgccggtgcgccgcctgcactttttaagaaattgcgtccttccgtcaaatcaacatccacatcggtacaaaagaaatcaattaacaattctccaatacaaataacagattggtttcccacattatcacactcatttgtcagttctcgattatagtttcagtatagtgctttctgtcataaatacaaccgtttacatagaatattttaaattttacgtatacttatcttgcagctctttgctccaggtcagacatcatctgcttatattttttttcagttaaaggataaaaagaaatgagaataatagacagcagaatgaacaatcccggaatgagcgcattcatatttttaatcgcattcaatgacgatgccgtctgctcggtattcgcggcatacccggcgattccgagataaacagccgagaatgacccggctaacgcgactccgagcttattgataaaactcatgctcgaaatcaccacgccatcagcgcggactccggttttccattccgcataatcaacacaatcggcaaccattccccaagcaagggtattcaaaggcgtcgtgaaaaacccagaaacgaaaagccaaaagaaaataagcggaatcgaagaatacgatgtaaactgaaggcctgcgtaagaaataagcgataacgctgccgtgattatcatgacttgttttctgcccctcttctctgaaaagaaaggaataaacagattgctgatcagcgctgccccgaaaaacaacacggttcctaaaaacacaaattccttatggttgacgttatacgtaaaatagtacaccatcgtgctgagtttaatgttaaacccgatcgcaaacgccaaaaatgaagaaaccaaaatgagcaaaggcttgtttcggaacaaaacagataatgtttttttcattccttgtttttttcttttttcaggctgaatccgctcccgtacagtaaagaaactgaacagattcaaagcgatgctcaccgccgcatagataagcgccgtcatctggaatccaaacgcctggtttgtcccgccgatggcgtccgcaagcggtgtcgcacaggagatcgataacagaattccgatataaaccaaaatcatccgggtcgtcgtcagaaccgttcgttcctccacggaattcgtcatccgccccgttaaactgttgaccggaatcgtctgcatgctaaaggacatcccaagcagaatataggtgatgtacgcatagaccatgttccccgtctcgccaaaatttggggtcgtaaaacataagaacgtaaataacgcaaaaggaaacgccacccacagcaaatacggccttgcctttccccatcttgtgctcgtcttgtctaaaatcacgcccataattggatcaaaaatagcgtccagcactcttacaatcagaaacaaagctgctatcaccgcaggcttaatgccgccgatgtctgtatagtagaataataagtatgcgtttacaaattgaaagataatattgtacgacatatcgccgaatccgtatccgatccgttcgatccaggtcaggccgtgatgtttcctttactgccgctgctttttctgtttcaatcatcatatcccaccccaagaatccgttttcatttccagtaaacaagagggagaatgcaaagattctccccgttcactcagcgatttggatacaccatcacttttaagcattcatttttatattgaaatgcccgttccatcgcctcttgcgtctgctccagtgaatattgatccgttacaagatgcttcgtgtccacaatgccggaagcgagaaattcaattcccttcggatacgtattggcataacggaagatcccgtatatatcaatctcgttatctgcaataaacggcacattgagcggaatctcgttctgtgaaggcaaaccgacaatcgccaattttccgccccggcgcacggaagccagtgcggattgcaatgccgccggattccccgctgtttcccaagcagcatcaacgcctctgccatttgtgatcgttttgatttcttcaccggcatcctgttcccggatattaatgacgtgcgtcgctcccattttcttcgcggcatctaatcgcagcggctccaagtcggtcacaatgattgtgcctgccccgtatgctttcgctgccgcaacggccattaacccaacagggcccattcccatgatcgcaatcgttgccccgggctgaagcttcgttctcacggccgcatgaatgccgacagaaaacggttcaatcaaagccgcatcttcataggaaagagaatccggaatcgaaaaaacaaagtcctgacgcattttgatatattggacaaacgcgccgtcaaccggcggtgtcgccaaaaactgcacatccggacaaagattataacgcccttccttgcacgcctcacagcgtccgcacgtgacaccaggttcgacagcaacacggtctcccaccttgaattgatcgacagacgatccgacggcggcaatttctcccgcgcattcatgaccgaggataaatggtttttccaccaaataattgcctattctgccatttgtatagtaatgcagatccgatccgcaaattccgacagccatcacctttatcagcacttcatcatgattgatgtcaggaacgggcaatgtttcgattttgatttctctcgtgttatgcataaccgccgctttcatgttttgaggcactttgtgagtcatttggcaaattcctttctctgctctgaaatgtaagtgcatacatttttgttttctctgttactgccaccattttaacttcttttcaagacgttcaacagcctttcctgctgtataaaaggacagccgcactgtactttttattttttcatatacaaaaaacactgaattgataaaatagtactaataggaggtgcaggctaaatggctgaactagaaaaccggatacaatttgcagaactgctggcacctgccgtcaaatcgctgaaacttcatcctgattacaaagtcaaaaggacaaaaaacataaaagcaggacagacttatatagacaaaattgcactcagattaggcgtttcctctaatacgatcaaaagctggatcggacagatgggcgcaaactatatccccggacgaattgacgacggaaagctgttcggcatgatctggatcattatagaaaagactgacatgggtcctgaatggctgaccggccttctggaaaccaccaccattcccgtcatcaaacccgcattgcccgtttggacggcgtcctgtctaaaaaaagcaaaaatactccggaaagacggatcattcggagcgccgagtgatgaagatgttgaaaaggcagtgaagcggctgtttcaggacagccccggccttgaaacgaatgcgcttacagaacagcctgtgacacataacctgccgtcacgccggacggggaactttatcggccgcggctttgacatggaagcgatccggcaatggatgctgtctccgtcaccggtctgtttaatcaccggctgggccggcatgggaaaaacgacaatcgcccttgaagcggcctattcgtgtatcggcggttcttcagattggacggcattttgcagcatcatctggatcagtgctgactggaaaggattgagcttcagcgattttttaaacacgatcgcctatcacctcggacgcaccgaacaaatcgacaaatcaatcaacgagaaacggttcgtcgtccgcaatgcattagccgctcattcaaacgaaaaacccgtactgctgattattgacagcatcgatatggcggaacgtgacattcacgaatttatcatcagccttccgcaaggtgtaaaagtcctccttacggcgcgggaaaacgtaaaacaaacataccgggacggcctcggagaaatggaggccatccagctgagcggccttgagcaaacggatgcccttgaattttttcagcaagaagtgcaccgctgtctgaaaacatgcaacctcccgcataaacgggagaagctggagcagctgttgaagctatcgcctgaccttaagaatgaattcatctcggcagccgccggcaacccgaaggccatggcactcagtatcgcttacatgtcggacgacgacatccccgctccgcagctcattcaagaacttaaacaagcgggctactcattattggaattgtttgaggttctctttggccgcacatgggacagatgtcatgaagacacacggaaactatggcagacgctttgctttttcgctaagccccctgatgagaaaagtttagcggcagcggccggattagacgcccgccgttttcatttcgctattgaacaaatgcggtcatatgccctgattcagccggaacgaaacgaaggaagaacacagtactcagcgcatcaaaccgttgttgcttacggagaacagcacttatccgaacatcaggaatttgaaaaagaagcccgcagccgctgggcgcattattatattgattatgcggaaacccatataaaacgggaacagcccaattctgtctattggagctatctgctgggacggaatttagagcaaatgaaaaaggaatggccgaatatcctaaaggtcatcgaatggtcaagcgaaaccggacaacatgaaaccctgatcgaactcatcacccgtatcagtcattttctaagcagaatcaacctgcccctgcgaatcgaatacggattaaaatccgccgatgccgcccgtcaatcaggcgaacacacgcgggaagcttacttcaggatcgacacggcaggctgggcgctgatggaagtcaatgatttagacggagctttgcagcaggtagaaaccggcctgaagattctggaacaatcaggagcgccggatcacgacgacttgaaagtatgggggctcgccctgcaatcgaggctgctgttaaaaaccggagacccggaaaaagcggcagcaatgctggacgacataaaagatcagcccgtctcgcccattatccggcacagggttcttctggtccgcggcgacctgagtttcgcccattctcactacgaagaagccatcacattatacgaagcggcaaacacaaccagcgccgcatacggcggcgaaaaaacgatagaagcctatttcaatttgggcatggcttacgtgaagtgtaatcagctcgaaaaagcggaaaaagcctttgaacagatgctctatgacaaacataacgccaatcaagttgagctgatctattactattacggaatggcacagctgttgtaccgtaaaggagagaaaccgaaagcgatcgaatcgaatcagaaggcgattcgtctgattgattcgtgggagcctgggattgggattcggggtgaggtggagcaaatggacattctcatttaaaagacaactacattgcggctagcggtacgagctttgaaaaacactcataaccttgttgtttttaaagataaaaaggtatctttatcagtacagtaaattgattaagataccttgattgaaaaattaatatttcacagaaaacaaatttctaaagttaaactttttaacaagaagaggttaatacttatacagccgtattaatgctgtactgtaatataatgttttagttcacctgaccaatatcttcctccccactcctgtccaacttgcacatcatacttacctgcaggaagatttttcgttgaaaaactcacacgaaaattacgtgaaccaatactatgcaaaatatcttttctggcaattactttacctttattatttaatataattactgaaaagccattatctaaatccctagccaaagtaccagtaaccacaatggaagtagctcttttcgtatatgtattagcatctgttttaaatttgattgtacctttcgaatccatagcaaatgcttctgacccacctgcgaaaatgataactcccaaaagtgctgctgtaaacagtgtcattactaactttttcatctttaaaattccccttttctttttaatattttaaatccacaattataataacatatccccctaaaaaaaagaggtttttccatatccttcttctgagaaatgaataagtatgatagaaatttattaatattaatgcaaatttgagtttcttgtgaaatgaatcttaaaatttgaagtatcatctataaaacctttgccaaggtggccaataaacccatatactcgaataaaaaattacaaagtgttaaacaaatacacttttacaaaaaattttatttttttcaattctagtaggcggatgtgaggagaatttgttcgcgcgcattttatttgcctgctcgaaataacgaatcagttattattttcatctgcagaatcgcgttctattttttcataggatttttcctgaaactttaagtgttttttccaacctcttcttttcttatggttttcccatacatgcagggtgatgacttttcaacggatctttgattttgtgcagttctaaagcagagggtatgatgaacacatttaagaattgatctatatcatcaaagccttttcagtcagttattgtgtatgtgaatttttgtatatcttttcgattgttttcttgtgcatttactcttgttggacattggctttaaaataagtgaagacacgtccggctattatgattgatagcctgaagtacaattttatcaaaaacaccttgtaagtcggttgtattttcataaagttagtgcatttcttctagtctataatgagtggtgcagaatattatatcgttgatattcaatccaagaaaccatatgttacgcccctcccacacaactattcctagaattccaagcgcccaatggatatgggtagaaaacacaatgtgaataacagcatgataagtgacactatccctaaatatctcctcatgtttccccctttctctttccttccatactattaaatttatttttataatagcttatatcttgagaaaacaagactattataatactcttgatctgcatttaaaattggcttagtgttattatttaataaagatctgtgcaatgaaaactctttctgtccgatatacccttaagtattcctaatcaacattatgctggtgagttcaaatatttcttcattcaaactctagttcttctgctctttttcaagatccaaacaattaatgcaataaaaacgatgttaattataaacgcagaaataacataagtttcatctgaaacgccaatatacttccctttcgattctaagagattccttacttgcttactccataaagaaccattcagcgaactatcgtctgctccaaatgtaatttgtgctgtttccttattgttgcttgtaatattaacaccataaaatactgtatacctattgttataaaagataggcatataagaatagtcagaaactaaaggctttacctttttggcaggtaatgatacgtacaaaatcgcagaataattacctatccctgtttcaaattgctctgctttaataaacttcgtgtttgaaggtagatcaatattataaaaatgctcaaaaatttgaatatcttcttccgaaaaatctgttaattggtagtaatgcggatcaataatacatttatgaaaataccatccattaaacaataaaaaacaggcacttattaaaattactaatactgccttatatataatctttaactgtatcacaatgatatgcgcccccctcataatatgcattataacgcttttcccaaaagtaaatcaaaacagcgatttacttttgggaagaattaattattcagattttattttttctttaaggcaatctgcaaatgcttgtgcaattgcttgaccatcctcttgggtataattattaacactaaaatgctgtttaaattccaaacagacaggattgttggtgtttaaatagtactctgcatccttagtaactgcttcaaatgaattattaaatctgtttttgaaaaattgagagtatcttgtactatagccggtagtatagtattcttcaaataccttgtaaactggttgtgaggcaatccctgttcttgtattcatagcaaggttaacagcgtctacatctcctaataaatccggaagtccaaatgtaccaatttgacctcctattaaatctattgcagcatcataagttgttttataattagcattatatttgacagtgtctccccctactgtaattaaatcacctgcccatcctgcaagatcttgtatcattcctacagaactatgaattattgcattaaaagtggccatcatatgtgcgtcatctagtgtcagtttagaaattggatctatcaggattctcttttcttgtcccttcaatacatcatcagctattttaacaaaatctgagtcaataaaatccgctgttaaaatccacaataaaccatcatattcatcttttcttagatactgggcaactaattcatttgcctgttgagtaatattcccgaccggattaggtttatttccttcctttttagtaacataatctactgctgtattatataaaacttttaattgatttaagaacttattatttgtcgtcgaaacataatcgttactattttctttattataaactatagaattaacgcctttatccttgcccgatgagatattattatcaatctctattttcccaagcccatcccctatactccttgttttaatttggtcaaatgcccaatcggtgggaagtgaatagccgcggttaccgctaaatcctgaagacatatcacatacaaaactactgactgagtaacctgctgcggccacgcggctacaaacatttctcgcgccataaataccaatttgataaccactattgagttgggcaaatgtccttttaattgctttaaaataagggagtatacgactggtaacctcaccgtcaacagcgtcgtaatctacagtaaaataaataatagtattttctttaaaaccatatcccttagccgcaccaatagctgctcttgcatcgaataccccttgagtttctgtaaaataagaagcttcagttgattttctctcgtaaattggaaatacgctaagacctgcagcaaatatagtctctaattcaggcaacgtcatctgatgcgatccagtaaggtatctcccaaccgttttatacccgttggatttcaaagttgctgctctggcagcattaattggtgtcgcacaatcacaagctgttcctttcctatcttcgtcacctttgcttactaaaagagatgcccaggtctgcattccagccactccatcggcaggtaatgctgaaaacctttgaaaatcaataagtgctgttctcatattttcatcgaagataccatcaaatcttcctggattacgattattacagtacaaagcatattgtaagagctttacaaaattagcttttgtgctacccattgagattgtcgggcattttgattttgtagcaggtccaaatgttccagttggttctgctattccttcttcgacctggagtgcgtaaattaaagcctcattagtttgtcgggagtatctaccgtcacatggattaaggccagtgaccttataatatttccgattcagctcttgttgaatattacgaattttggcatctcctacatttacaaaagcgtccatatttaatagcgctttaaagattataggagttgcaattccatcttgattagacaaccctgcatcagtttgaaatttttttatagcagcctttgtaccatcaccataggttcctgtaaaaccagttggattatatcccttgcaatacaatgcaccttgaagaatcataatttgatttcttgttttttcattcgaagaatcagatttagttgataatgtaggacattttgccatagtagccggtccaaatgttccagtagttgacgtaattccttcttcaatttgtaatcctgtaatcaaagcctcaatcacaggccaccctgtttttccattttcatcaatttttacataacctggcctgtttaagtaaacaagatttacccattgttgaactttttttaccatttcatccatttttcccactccttattttttgttagtatggtactttcatttaaaggtggcaaacgtatgacaaattaagagtatctactcttacttcaaaagatgtaaagaataaaacctatgaacacaaatccttctacaagatttgtaacaaagtcatataccttgatgcaattgaataaattattctaatttattcgtaatttgagattaatgatagaaataaaaaaaggcctctcacaaattcattgaacttgtgagaagcctcgaacattcataaatagatcaaaggggcatcaaaatgacgtccgttgccgacaaacccttgtaaatcaagggttttttgtcggttttacatcattccgcccatagatcaatcactttcaagaacatacattctcattcatttgggcaattcaatatttgttttttcgctcgattgccctcatatctctcattgatattcatatttggatttataaagtgtgaccaatcgtgtgaccaaaattgaaatcagaaactaaattcgtttatactcccgttaggagttgattcagaatgaccgattttgagcgtaaagtgtatcggattatttttaacatgagccgcttcgggaaaaatccctccatggaacaattgaaaaggaaaacgggaaaagatgagcagacgatccgtgctgctgtgaaaagtttgatgagacaacgcattttgaagtgggataagaaaaaagaaaagtggattttctaactttacattgacaattccataagaaaatagtataataatattaacagagctcacacgcctcttgttcttcggaataatgcggaccacagtgagacttttttttatctaaaggatggtaaattatgtcaagtgtacatacccctaaagtctttaaaacacatgaagaacagcttgaaatacttaaacaacgtggtttaaaagttgatgatgacactgaagcattaaacaccctaaaaaaaatcaactattaccgtttgacaggatatatgttaacgatgaaggtaaacgacgaatttcattcagacgcttcgtttaatgatgcagtacgcttacataattttgatgagaaattaagaaggattttattgagggctattgagtctatagaaatttcatttaaagctcaactggcatatagttttgcagatacttatggtcctttaggataccttttttcagaaaatttcaaccacgatcaaaaaagtaaaaaattccatggagatttcattgaaaaattatctaacacaatcatgaatagcagtgatctttttgttgttcatcatcgtaaacattataatagtaagctgcctatttggggcgcagttgaattacttacgatgggcaatatatcaaaattttataaaaacatgcacagcaaagataagaaagtaatctcaaaaagcttatataatggactttcgcatgccgtgcttagtaattggcttgaggctattactatattaagaaacacatgcgcccactattcaagagtttataataaaaaattctcattttcgattagactatcgccaaagataaaattaaataacagcaagcttgtttcatttatttatattttgaagatattgttgtctaaacaagaatggagtaggtttcttaatagttttttagttttaacagaagagtatgatgatgtaatagaaatgcatcatatgggtttctatgataattggaaagaatatattaattgatcccccaccgaaatgggggattttatttattttaagagtgattcaagttttgctttcgtcttcggcccgaaaatgccatcagcagtcaggccattcatcacaaaaaaccctcctcgtcacgagaagggaatcattcatcatacaaccgatacttcttaacgctctgcctctgacttttttagagcttatacattcaccaagagaataagtaggcattataccagcttttagaacaacaatagattaatagcataataaacaccatcagcaattattttggccgatcctccgccaatcttacccttcaaagccttaaatagcttgtccgaaatcatatgtgcagtaacatcgggaagttcagctatttcatctatcttatctgctatgtagcctgaattctttttaaatgcttttgctgctttagcgtcggcatgttttaatatttggccaaccgctgctccgccatgtctaattcctaaggagactgtatttgcagctaatttgactagatagcctttaatgccggtagtgtggaacactggctcctcactctgttcctcagccaaattgttcaaagtgttagtttgaacattaacactatgtgttgttcctttagtctcagtttgactattaggagttgcggcacttgcaacgcttggtaatagtgttgatactaaaagtaagcttgtgagagaaagaataattacgcttgacataatctttttcattttaccacctccttccaatatagtattatatactaaaatttataatttttgtttaaaattagttaaaaaaggagatttaccatgagaaaaatttacaatcatatgaacgttgaccaaaaaaagactgctattaaattgtttaaagaggatttagaagaactgaagaaggagcagaaacaggaaagtgaaaagggttaccctcgggttgtaagagatgcaattgaggaaactatacaacggtacatacaagatatagaatacctaacaaatgacttaaaacaacatgagcaggcctaatgcctgctcgtgttcatttcaaaagcgcttcgatcttcgctttggtcttcggcccatagatgccgtcagcagttaacccgtacatagattggaatcgtttgaccgcgtttgctgtcttcgcaccatatgcaccatcaattccaaaattctttgcactcttatccgggtagtaatgaagagccgccagcgccgtttgaatctgttttacggcctcccctcgggtcaatgggcttgtgactttaaaagtacccgcaggcaggctgaattttgatttctgagtgtttttaggctttgaggctgttaccttcttcttgccgccgcttttcagctcgttatcgcttttgatataggagacattcacatacccgtggaatgtctggcctttagaattggtgtattcaacatatccccatccgttgacagttgatccaagctgatattttacaaccgtgccattcggcaggttaagcaccatggaagaagaggcgctccgttgtgtacgtaaaacaaggccatcacttgaaactaccgtgtttttgatgaaacggcctttattcgaatcggtgttggtttttgatttgttgttagttggtttgttaattactaccccacctaatcgcgcttttactccattcttgaaatcagtaaacccttgtgatctgcttacccatggggccggacagattttgtgtgtaatgtcatagtgccgcacgatgtcattgatcggatcgagtttatacattttgcacagttcggcacaaacttgttctgcacgggcaatggtatccagatggaaagtgccgttcttttcaatgcaaagctccacgccgatagataagaaattcgcattcggcttcagcgccgcgacaccccggtaaggctgcccgttaacaatctgttggacatcattcgcatgataagccacctcattcaacggaatgatacaaatagcctctgtacgatcgacaaagatatgtgcagaagcaaacgtctgttttttctcaaacagatttctgttctgtgcggggagcgtttgaccaaagtatctataatgattggcagcagacgcgccggggtttgccgtgtaatgtacggccagtttcttcacgccgttgtttttaattcccggccgcgtccatttattaatatcaatatattggtttctgtatgctgacataaaatctctcctattctgtttttggattcaaaaaaagcagccggattaaccagctgcctgatcgtctttttcttttgtctgatcgttgtcgctttcaattacgtgaagccggtcagtgatgacggccgggattttaacgccgatctgtgccaagttttccgtgatggacaggccctcatttgcgatataaaaaagaacggtcccaaaggtcagaacaccgttcaaatttgttatcgtatcaataatgtttgcgacgatgaccaccataaaactgagcatcttccggacatatccaaaccacgcgctgcggctccggagctgcttcattttccacgctttgataattccggtgatgacatccaagatgctgaggatcagaagcaagtcaaggtatttcacctccccgaaaagatatgttcttgcgatctgtaagctttcaaaattcatccacacatgtattccctccattttgatcacctccttcgaggcaaaataaaaacacctattcagttacaggtgctggttcactattattttctttcgctgacagtgcagcacttaattgttcctgaagttcctcgcgcttcttttgagcaaatgtatataaagccttgtattcggcgcgttccttattcttttgatctaattcttcttgcagtgaaatggatttatagatttcaatctgtagctgttcttgaagctgctcttttgtcatttcttgcattccgttcccctccctattcttgatccggatacgcattaccgcgctcttttgctgtaatttcatcatattctgcttgtgtgatgcggcctttctcaacggcttttctcatttcaacggtcaaaacagttccatttttccagcagtcttcaaaaaaaccgaagagaacgcttcgattctccaatgaaatttcctccgcttcttatgattgattcattaagagattgcaaacacgctgaagatcaagagttctagctttcaaattttcctcttcatcagtttgagaaccttcgctttcttctttaatacgttcaatatcttccgttgataagccctcagtccagcagttattttcaaaatctcttttaaccataaaaaactgttcggccggagcttcataaaaaccttcaggtggctcacgatcttcagaattctgataaaacacgccgtttacaaaaccttctttatcaactcctaaaaaagttttcatggcaatcccacctatttatcttttggtctaaaatgaatgttgctaattgacacttcatattctcggccgtcagtcggtccatagaatagctttatatcgccgctaggatacacagtaaaacgttcctttccggttccattccaaacataagcaggaaagatttgctgatactccggtgcaacttcttcaggcagactgcaaattacataatcacgcagctccccagcgcccatttttctcaaaaagccccgcaacattacatcgccgctttcattaattcgatatttaaccggaccaaaagagcctcctttacttgcgaaagggctcataacctgcaagaattcccacccactgtctttatttcttatcacaaatcttgattttttgtgctccaaaaccgcatcatatctatctccatctccgccgatgtaatttacagtatttttcaactgcataacaacctcattgttcagcgaaaaatcaaaatatgtgccagctgaatcatgcgtatcattttgattttgtgaatagattttcagggccgaagtataagtttcttccggaaatgttttgcctccgtctatcgtaattgtgccattctcgattaacacacggtttatgtcatatttaacattcccgcttgtatcttcagcctgccttctttgtgagaatgatgaagctgtcaattctaaaacatcatattttaacccttcatttgctctttttctttgatatattgtacccgcttcaatataggcagtcagtgaatccgagtttgagattggctcaaaccgggctccttttatcaaagaaccttctatcgtgatccccttgatcgtgccggcatttattttatcagcagacaaattggcgatttttgcgtttgtaattgcgccgtcaatgatatgcgcagtgtcaattatggccgttccgagatgcgccttattaattgcggcgttcgcaatagcagcagaccctaccgccgcatctgcaatttttgctgatgttatcgcggccgattgaatattggctgaaccgaccgcaaggtttgcaagatagttattcgtgatgaccccatcaaccagggctacgtcatagggactgtagccatattctttaattaccgctccttttctgacttgaatttttcttacgacataactgcaattactgttatcatccgaaccacggccgcccaaaccaattgtgtaattattaccggtttccggtgccgtgaattgaatattcaccctcttgaattcatctgccgggtaattgcttatgtcagtgagcccgcttgaatccaaggaaataaaagtgctgcctttttttagatgattccaagatatatctgttgtattatttcgtttcacttcaaaagacaatgtatacacgtgatcttttacaagcgacatcgtctgtttgacagagagttgacaaacaccaaaagccttggcgccatcctgagaaattgtcatttcattgaattcttttttgtctatcgtgtacttggtgcctgaataggcataccaccagttgctatccaacaatgaacccggcaaaatattggcatcatcaaagtttctggaaagcttatcagcgtcaacggccagctcggccagtttttcctttgtgatcgctccgaaaacaatgtcatcagtcagaatgcgctgagtggtcgcggaaaactgatccgtgaattcgctcgcagtgccccgtgtgttgattgagcgcaagcgataataccaaacttcatttactcccgtaaaatgctcgtatccgcctgttttgcctctgaaaatacgattctcttttaatggggtgaatccatttacttgtgaagcatatacctcataagctgcgatataactggacggatcataatcccatgtcagggccacattctgaaacattggcttgatcactacattcgacggaacaggcggggctttatcagggaaactgccatccgtaacctctccggcatccggtttgctttcccaagtgccacggttcttttcgatcacactttcaatctgctcaagcctaccgtctttttgtaatgccgataaaaattgcccgatctcaacaacgcaagtattttcaggatcggtaatatcgtattccattgaaataacgcgctgtgatgtctcaattgggatagcgaaatttcgatcaattgcgatcgttgtatctcccaattccacatgttcgtgttcgtgtcccggcacgctctcgagaagttgcacggacagttcgtaattgatttctgtcttacatgcagtcgtaatcaaatgatcatatgtggcctttaagagctcttccggctccgttatgtcttcattattgaactggccttcccgatggatcagctttccatctttaaggcgccccaatcgttctaataaatccggatcgccaacccattcctggcctaaaggcttatcgaccgggtcgccttttgattttttccattccacttcagagaaatcaataaaacgagaatagccgcccgtttcctctccttcctcatccgtagatgctatggatgccccgtaaccccaaagggctgtcaccgggtaactgataacagtccgccggatattcgttgtatccttatcactctcaaagcgcttcccgctgtctttaccgcgacggggaagtatttttatgattcgtttgacgaccttatttccatcaaattctatagtgtcctgaagctctccgccccatatattgatcacgtcagcaatacaatccaacgctgtttttttatagaaggtagtcgaattcactccaagctccgccgttacttccgccacccatcttgaccgagaaagaacgttgtccagtacaaactgagcagttttattggtagggcgaaaatcttttacaaaggtttcggcaagctccatcatggcagcctcacaggtaacctgggtgttaacctctccttcttcacttgtatcatccagttccttgatgacaaacagacgcattacaccgtctttatccttgaataccacttgattttcttcgaataggaagcgtgcatcagggtgggaggcatccgctacaaaagaaaaagaagagcccttgttgagctcttccttgtatttcgcatcccagaacgtacaggtttctcgtccgtggctggacagcactgtcaataatttatcatctggtgaaaggatataaatgtcagccatgaccggacctccttacaaatatgcctcattaaatttgatgctgctcttatgactgaacttgattttaactggcgttctgggcggcagcagaaaccaatctgattgaatttgaagtgctgtcataattaaattaccgctgcaagtgacctttctttttgctgaatcaattacaagagtgtcaccagcgatgaaattgtacagcagcttgatcgttttcgatacagacccatcaccattaagaagagccacttcatatgaagtggctttctcttcaaagacgcattcgattgtcgggtctacggccgcatagcccggattagtgatagtctgaatacctgaattaaattcaaaatccttcgccgggccgtatttttttggatcaggacagataaaagtcaatgttgcagtctgaaagcctccctgttcttcgccttctgaaatgctttcaaagacagcattatagactctgtcaggctcatcgtgaaaaattaacggtttaggttcttcggtgtgcagaataaaagtcagttcctcctgctttttcttcagctcttcttcactgctgaaggcaaaaagaacctccacggttatgactcttacagggattcttgtgtcccgcaggaaaccgccggggcgattcccgatagtggctgtattcacttctcttcctgtcactccccggccgcccgtcgacttcacataaaagaagggtgatatatcaatgccgtcaaacgtgattttccattgattaggcagcagttcctgataattgatcaattaaatctatccctccttgcgtttgaccgtttttgtgcgtatgttacaggctttactactccttgaccgaccttcttgctgtccatctcaacaacaatcattctgtcaggcaattcaaggtttcggatgtccgcgctcaattcttttctaacagtgccaagttcaccgctagaaatggatgtgtcatatgcaaaattcatatcctcttgctgaatagtcatagcttcactgacggctcccatagctttttgaacagtgccgataccattctgaatccccacagcgataccagcaggaaccatgatccccacctgatcccgcatcaatctggatggggagtggattttcaattttttcttaatggttttctcaattgtcgaggcgatggaatttgcttctttcgccagctcgccttgcatattcttcattccagaaataatgccagccattgtatttgaaccgatggcttttccgcttttcttaagagaaccaagctgttttacatccactgtaagctccccaattttgcggagatagtcatttttcaaaagtgccagttctttatttgcggcagatcgtaattcaactattttcttggttgtctcgttcttcagtccggttaattctttttccgcctgagtgctcgccagcttatgcttttcctgccacagcttgacatactcatttaactcggaatctgtcatgcgtgaaatcgcattaatctgatcagctgacccgatacccatttctttcaattcatctgtgaacgccttcggtgcccgacctgctatttttgaaaagtcattgttgaacgttttgatcttgtccagctgctttttaagatttgcagtcagcttggagccgttcacattttgacttgagacatcgtcaaatagaccgatggcgttatagatcgcgtcagttcggtcttgcagctcttttttataggcatcattggccgccttaatatcggcagtcagtttatcattcacacttttgaattttgagagataagtattgtttgcagaaagaatgcccttgttaagtttgtcagccgctttcttttcggcttccttctgctttctggccttatcagccatcgctttttgagtctggtagatttcccgttgaacctttatttgctggtcagaattcagcttgttcttcttcttgattttctcaagcgttttgatataggtattcccgctgatttttcctgtatcgtattttgcctcagctttcttaatctgatctgatactttcttggtatacgccagcttcgccttcgcttccttgcgctgctgctctttcagaagcttcttctgcttatcagaggcgcttttggatgcctgatatatctcgcgttggatttttcggttttgctcgctggtaagcttgttttgcttctgaatcttctgcaatgttttgatatacgtatcggcgcccattttcttggtgtcatacttcacttcagcgttcttaattttattggaaacctttacctcagccgccttctgagccgctttcgctgcttttgccgcggccgcttttactttgccctgcgatttatcaataccagccgccataccggtgccgacgtgatatccgacctggtcacgcattacccttgacggtgaatggattcccagaagctttttcatgccgttaggaattgcgtttgccattgatttaactttgctcgctaatgcacccgccatgccgctgataccatttattaagccttgtatgatgttgcggccaatggacttgaggttgatgcctctaaaaaatttcatgacaccattccaaatgctgacaatgcgttctttcgttgcttggatacggtttacgatttgcgctttcatatagctgaacgctgtagaagctgcgcttttaatgccgttccaaatggacatcactttgcttttcactgtattccagaggcttattactctgtctctcgtcgctacaattctattgacgatttgcgcccgcatgtagttgaaggctgttacagctgcactttttaaagcattccagacagatgtcactttgctttttatcgagttccacaaactgaccattttgtctctggttgcaataatgcgattcacaatttgtgcgcgcatataggtaaaagcagtcactgcagcacttttcagggcattccatatggacgatactttactcttaattgcattccagatgctgatcattttatctctcgtcgcaatgatcctgttaacgatctgcgcccgcatatacgtaaaggctgtgacggccgccgatttaagccccgaccaaattgaggtaatagtgttcttaatgccgttccatactgaagtcgcagtctttttaataccattccagacagaagaggcaaacgattttatagcattccaaactgttgtgaaaatggttttgtacaaattgaattcccatttaaagaaagcagatagcccgttccaaatggttttagctgccgaaacaattccattccaaacagtggagaaaaacgacgttattgcgttccatgttgatgttgccgctgttttaatgccttcccatacagattggagccactgagatatgacgccccaaacttgaagggtgtacttcttgactttatcccaattggcaataatgagaacaactaaggctataaccgccgctgtaatccaaccgataggccccattgcgatgatccatgacgctgccatgcgcgccgcatttgccgctgcttgagctgccaaaatgaccaagcgtttaccaaataagatcatttgtttaatacctgccgccaacattgacacaaatgaactgatttttgccgcagtccacgccgctgccattcgtgttgcttgggctgctgattttgccgctaaaacagttattctggcaatgaaaagccccatctgcttaatgccgtttttcagcattgttatgaaagagctgattttcatcgcagtccatgacgccgccattttaacagcattagctgttgctcttgctgccatcgctgtatacttcgcaatgaattgtcccatagttgctatcgctgattttaattgaccaatcaggccggccagctttatacccgcagctgtggttttgaaggttcgtagatattcagctgcatctttaaaatctttaagaccgttggtaacagcactgactgctactatcgccggaacaatagctcttaaagcaccgattaatgaaatgcccgctgcaatgaacttcccaattgccgggtttgcttccatcgccgcattagtaaatttcaaaaacccgtttacattctccaagatcgttttgccgagtggagccatgccaacaagcaagttgatgatagtcttcgcgatctgccccaatgtgctccatactgtagggccgttagttttgatatagtcaatgaacgattgaaattcttttgttttcgtaacgctgccagcccactcattgaaccgctttgtcatacctaccagcgatgtcatcatgtcttgagacataggagcgaatccagtaaacagcttagtcagaccgcccgaaaagtttctgatgatctgcagcagtttcgggccgttggtttttgtatactccacgaaagcctgaaatttctttgaggagcccaagttcgctgaccacttcacccatgattgggtcattccttcgatggattttgtcatgctctttccggtcggtccgaatgctacgatcagattaaaaactgtccgtaagacattcccggcagatcggccgaatgaagcaaacgcccccggagcttctttgttcagataggaaatgaatctctgcatgtccggagctttaaaagccttgtccatgcttttagccagtcccacgccctcttttgccagtccatcaaacattggaatgagtgagttaagcgcgagtttaaacgtatttagagacataccgaatgtttttaagatcggcttttgaaccatcgtaccgatgtcccgccaattgtctttaaagtcttcgaggttctttaatgcctctctctcttcttttccaagagatttttgcagattattgatctgtttcatgattttagcgcgctctttcgcgcttgttgcattgtccagcttctcctgcagcttggaaaggtcttcggatgctttgaatacaccgcttatcgaagtaatagcaagggcgccgaatgccgccgcgcctgttcccgctgttgcaaatgcactggttaaccccattactccgccggctgccaccccgagcataggacccaatgagccgattaccccgacaatacttgcaagggctggcgagattgcagggagtagggacgttagtgccccggcaattgaatgaccgatgaccgttgaaactgagtttgtgatcttggcaagcctgttcattgacgtttcaaaccgatcaattcgagcttctatactaatccatacttttctcggcaaggacgccagagcagcgcgtgccgttgctacagagcgcataagcgcagctgtgtttccgtttatgaccgtggtaattctgtttggcagtgaagccaaagctgaacggactgccgaaaccccgcgcatgataggcgacgtggccgcattaaaagtggtagttacgttatgagatactgatgctatggctgaccgcgcaacagcgacagcacgccctaaaggagtgggatttccgtctatcgtcgttgtgattctgttcgccaccgccgatagccctgctttagcgcgtgccaatgcggaagataacggccgcacattccccattaattgcgtggtgacagtttggggaatctgtcttaatctttgcttcgcccaattgatggcccgtgttaaagggtctgaatccgcatctaaatcaacccgcgttcgttcatgtcgatgaacaaaattatctatttgttgcgccgcctgccgtactcttgcttgaaagctggcaatttcggcgtcaatctcgacagtgtgatgatcagccatccggcgcattatatcgttgacacgatccatactgcgattaaattttcgtgtctgtgcttcaactatcgctgtcagtctttcgatcattccctcaccccattccttgtccggattttgaaaagtggttgcggattgcatcattaaaccgctgaacccctttggctcgtttgccaagctcgtttacatctgacttgcgccatttgtcgttatcgccagtgatattgcgctccaattgacgtctggccttctttgcatcaaacattttcgtttctttggggcgcttctcattcatggcgtaacggtgaaacatggcgtttcttgccataagctccaattcatctatttttcgcaacttggcccctttgagcagaagcttgtactcgttaggagtccatgacatgattaaatccacatcataaaccccgagccaatgtgcggagttcgtaattatttggtcgtagtcgatcccgttctctctttgtatgcctctttcatcatcttcaagacttccttgccgttctcttcgtcctccaaccgtttcgcttccatttccggtgtttcgttcggagccggtttcttccctttgttcatcttctccatcatcttccaacgctgacggatcacacctttgaaaaaacccgctgagtccagtgtcgtgaatgcttcattgatcatcttgtcaattgcctcgcctgtctcgtcttcatcaatgattttcatgattgcttcttcaatagcctcagttgaaggcttttctttcttcaagtaagcaagtgcgcaatcccaaaaagcagaaaggtaggaagcctcttcattcagcagactcatgtaaatattcattgtgccgcctttgcccttttcgtcctcagtggagtatttttcgtttgccaatctgtcaaaagcaaagtcgcaacgtgatttgtattctttatctccgatagttaagtaagccatttataaaacctccgattatttttgtatgttaaaaaagagcccgggaagcccggaccctatgattccttttctgttcgtatcgtaaaattggccgatcgttccgattccccggccgagttcactgccgacacgttaaaaatgtaggcggtatccggcttcaggttaggattcgacgtgtacgagttcgttgagacagtcgctatttttgcgtaaaatctgtaaatgttgtaagatgtcgcccctttcaccgcatcccatgaaaaactcacctgatttgaagtggcgcttttcgcagttatattgcggggtacgttagggcgtaaccgcttgtgtttgcgtaacaatctcagacattgaggactcgcccgcatcgttcacagcagagacgttgaccgtcagtttcgtgtcggccgcaattcctgtcaaggtgtgggatgtgcctgtgacatttgcgtccagttgcttgctcgctcccctgtataccttatatgaagttgccccatctaccgcatcccatttcacggtcacgctgtcagtcgtagccgtgaacgatagattttggggcgcattagggcgtagtcgtgccgccgaattcctcaaacttagtcgcgccggcagaggattcaatcatcgctaaaatttcatctgatagtggcggcaattcgcctttgaatgttttcccgagcacaggcagagttattgaaacctcaacaaacccatcctgcggctgactgaattccaaactttcaataattgcatgtccaaagacagaatcatgcttatcatttttgtttttgtttttattgactttccagaccttaattgccttttcgttatcataagcactttcaatcgcttcctgccccggatcggtcacagcagcataataagtcagctcaaagctttcattttttgtaccataaccgacaatacggcctgattttgtggactcatccagcgtgtcctgttctttcgtgtgtgacccttctgtttgaaaggcgatgaacagcccgtctgccccttttgcatccatcggctgcacaaaataaatctcatctttaccgtttaataaatctggcatttctttcatcctctcaattgtttattgtgaagcgcattctgagaatgccgtgacgcgtgtacccgtcaatatcggtgatcacctgcatgctgcgcatctcagaacggcataaagaaaagccctctattgttaggggcctgcttgttaacgcttgaagcatgaggctcagaatctccattgcttctttttttccgttgtaacctgaccagcagtgtaaaaccacattgatttcttcaccgctggatgtcttggttttaaatggggatacatcatcatcgcccattgtcacataaggcttttgctgatctttcgggactgcatcaaagacgcccgtgacgcgcccgtccagctcttcgtctgttgataacctcttaaatagagcagcctgcaacggccacagggcagatcgcatgatgacagctcctttctatcacatttgactggcaaaataccgcatgccttcgtccacagctggattccagaacggctgcgcccgcattccccgggtgactacccatctatttagcttggtgtcgtaataaacccacggcgtttgccggccgccgccttcctctgcgtaaatccctgttccgtattccacatatacggcataatcggcaccaacagaaataacggcccgtaagccgccctcttggtagtcgatttcaattgaatttttcaggttccccccgtctattgcggcggtcggagcattcagaacagcatggctgtaaatcagctcggccgtgtctgtgaccagttgcttaatatcatctatgacccggcttctgaattcgctcgtggctctttgcatctgcctgacccatcttccgctcacctcagccattgcccttcagtacccccgttacctgacatttcaaattcataatctcatgcatgccgccctggtcgatcggatctgatttgagagtcagcaccttgttttcgtagatgatccgcattgtcttctcaatatcattgcggtacgggaaatacacattgcaatcaaccggattctgaagctgttgagcctgataatattcccgggacgtaatcccaccgacaaaggcctctgttgtgagataatcagtgaatttttcaacatagcccccgccgccgtccggcacctcttcccaccgctgaaacgttatgacatgcgggaattcttcatagatcatcggaatgcctttctgtatgggtacagattcttcataatgtgttgcgggaattccgtgttatacgaatatgacacatcccccatacttctcccagacagaccagacggcgtcatattgtattcagccgctttcgcaacaaatatttttacaccagcgggcagcgcttttggatcaaaagtatttttgcattcgtctgcggcaacctcaattaaaatagggacaacctcagacaaataagcgtcatgcttatcggttgttatccctatcattcgtttcacttgttggatgtccattggatcaccctttcaatttttcgagaagtgtttctcgtttcatgttgtaataacctgagatccctttatcctttgctacctgcttgagttgctcgacagtcatttcgtcataagacagtttttcttgagctgccttatcgatgtttgcacgccttttcaattcttgttccaagagccaaaaggttgttgctcccatttattcgctgcctccctctgcattggttttagttgcgatttccgacattgcagattcgccgctctcattaacagaagtgacattgattgttaacttagtatcaggcgttagaccgtccgtgctgtattcaggcttggttacattcttatcaagacgtttgtctgctccccgataaacattgtatgaatccgccccagctacggcatcccaattgacagtcacagaattactcgtgcttgtaaaccgtagattttggggcgcattagggcgtaggagtaggctcatctactggaagtgaatcatcaacaataatggacttttgaaggtatgttccaaaacctacatcagccctgttgttaggaatgaactcaatcaagttttgtttctgtaaatttgtatgcgttactgaatgcattgcaattgaagtgaatttccctttagcatccccgagtaattgagctgcatcaagaatcacttcaccgcttaattttgatttagttgctgcttctggtccttcattggaaatgatcttcacaattcggactttctttttgtcataaacacgttcatagttctttgcgcttgccaattctttgaatgtaggcatttcagcagcaacatcagcttcggtccatttgaaaccacgaggatgcataatgaacttcttacgattgatcaaaatgtcctcaccttttagtgagtttcgatctgtttcggttggtgttttcggcatacctggggcataaccaacggcacctccagcaaataggtaagttgtgtactttttcccgtcaccgctcgaaatatctaatacaagatcgccatcattattagtgatgttgctaccaaagacaccatccaacataaggaagatcattttttgaaactgtctttcccaatagtaattgacacgatccccaattgctctcattggatctgatcccgcaagctctcccgctaaatcttctgcgctccaagccttaccatattcgaatacccgagcaacgtctttccctgctttgattttttctggagtcaatgcaaagtttgattgaatcgcctctggatctccttcaagatcgttccaaaaaggcatattgactgtatccccaccactcggaacaattaagcccggtacaggctgaataattccacttcgatataccgctgtttgttcaacagtattgttcattgtgtattggttaaaaatttctgggatgataacatcctgaactctagttactgtcatttaaattctcctttataatccatagattgcaggatttccgcctgcttggataattaattttcttgcttgttctggatcacttttcaaaatgtgaccttgctcagtcaggtttaaatggtcctgactaaatggattcttgcctgttggtgaatgaacacctgaatttgctgtgtcgtgtggctgcctacctgctaaagacggagcgcctttttggtcttcctcaaaaagatagctgtcgctttccctgagagccgttagctgttcgtcaagaccaatcaccttgccgtcagctaatttcaaaccatcaagatttaaattggctttaacagccttgatgttttttgacttcgcatcccgcaatgctgattcaatcgcgaagtcaaaagcctgctgatctaatttttgctgatactcctcagcagtttttttgttgtcttcttgcaattgttcaattgccgcctgaagctcttcgtttcctttagcctgtttctgcaaggcagtcaattgctggtcccgctcgtcaagctggcttttcaagtccttcttctcattgttgactgcatcaaaacgctcctttgggaaccattggccgttactgacaatatcaatcttttgatctccggctttttcgatcacctgagcatataaatcatcaccgagcaattcttttaaactcatttcattctctcctttgatgtttttttgcgtgtccacctcacgcgcaggatttacgtttgtttttgctctaaacctttaaaacgagcagacaaaagagccttttaacgtcatgctcaggacaaaagaaaaaagctgtcacatgagtaaccagctttaaagcttacctattttgttatcgaaaatgtttgttagcttaggagcaacaatgccccatccattaaattgactagagtgattgtctttcgctctgtactctttctgtaattcaaccattttttcagcagtctttgtatcaaatgctttaggagtaaacagtgattgcttcaactcactgataatctcgttgtagctatcagagtcattatattgaattgcactattcaacatttctaggaggtatttaatacgttcgttctctttcatgaatcatttccccctttcctcaatggatttgtaccactcttcataggtttggtatgggatggtctcgccagctccattcccgcgcttacgggcccttcttgtatccggcagcacgccgtttactttgaaagtaatcgtgcaacggcagttaatatcatccttggcattattcatgtgccccggagccggcccgacgccgccgtaaattgatttgaagagcccattgcgctctattgtcttcccgtccagcttcctgtgcccggctcgtgttttaagatcaagggtagcattccacattttttcaagattgctccgttttgaggccttctcagcgctttccatcctcgccgacacttgtaccctatgagcttctgttctcgctacgtcacgggcttttctgcgcgcgaattccgtcgctctttcaatgcggcgggcgatctttgaataatcctcccccgcttgcaggccctgagcgacggaaatttgaatctgtcggacataatcgtctcgatgtcgcctgtatatcgctgacaaagtcaattcggctatagggtttagaatggcctgccgaatgacttcggctgtcgggatgctaaaacccaagtttaccacagattccaattcaaatagataagcagaacgcatgtaattctctaaaaactgcttggctgctaatgcctcaacaattgtcagaatggttttgaaagccttgtgagattcctcggccatcctctccatttccttgttcagacgattgtatttgttggcatcggcaaaagtaagctggccgtccttgctgtacttcgcatacagccgggcaatttgtgcattgatctcctttaagcgagacgcaaaaacgacatcaatcttctgagcatcctcagtgatcatgtcgtccaggtacttatcaatatcattctggttcatcttcatcaccgcccgcgtctgtttccacatccgttaacggcggcatgctgttcctgtattcgatttcttcagattcaattcgcttcatttcagcttctacatcgtcaacccatggatgatgagcgagacgggtttctttgcttaaatcagtgctttgattacccatctgcacctcttcaagttcattggtcatacgtgaacgattgaatgtcatttgtaagagagtgtgatcgtattccccttggccggtcatccgcaaatattcagtaaaaaaccaaaagaaggcatgcaaagccggacggaatttcctctcagcttcatttgccttcagatcaagtaaagaatataggtttttaattgcaacgttcgtcggtgaatttcccactttgtcaggattattgttaactccctgcccgaaccggtatatattttcttcaagtcggtcaaggtgggtgttcgcgctgtcaatcggtacttcagcagttttcatatccattccgccatccgaaccgacttcaacggccttgtaataacgtagatttgtcatgaactcgctcaaattttgaccgccgaagtttttaaggatgtaaatgaagtcttgcatttcatcaaaagtatttgcgttatttgaaatgttgctgttgtactgatcaattaaatccttgtaaaaaacaagatcgctgacgccttcttcattgttcttgaattcgattaaggggacttttccccatccatacccggcattccctaaataaaaatgactctccgggtttcgttcgtagtcaaaatcaagaacgagagcgccatcgtgcatgacgtagtagaatgtctgctcatccgtatacaattcgaccttacgagtgtattcatcatcaaagtttttcacatcataatacctgatagcatacaggagcttccgctttttcgtcgtatcgtataccgcaatgacttcttcagctggaatccggataaaatcaaatttcccgtcttcatcaacaaacgggtggagccattcactgcccttattactggcgttttttaaaagctcattcattacgtcatcaaaatcttcgtttacaaagtcattgaccaactccaagaactttgaatcttcagcattaaaagtgattggtttcccgaccaggtattgcactttctgttggaccagcagcttgtgccagttatgagaaatacggttattgggtttttccttatctattttgcgtacgccatcctcatagaaatagcgcagtcttttttttatgtcggcctgattcatgtaatatgcgacgccctcaagcattcggtcacgatctaattcgtgtttatcaatcatcttttgaataaccgtagtgttcggcagagtatctgatgtttctgcactgtcctgaatgattttcaacagctcttctgtgtgtgttggtgttatcggatacaataggagtcagctcctttctttttatcttgtcataacccgtacgcccggccgcttcatatcccgttcaaaagcataacgagtggcatctatagtgtggttgtcagcgtcctcaagccgcgccttcggattgccgtctctatcagtctgatagtcgatattctcgaattctcgggcgatattaggtgttctcaacggatcaatgataatggcgtctaaatcatcaagccattcttcgccatattgaaccgagtcaggtccttttttcgcgcctgtaatgcgccggatgccatggtctattttcaattcatcaatacttttaggttcggcactgtcagcagtaatttcttgactctcatatccttttgacctgatccattttgccagctctctgttggaaaccttttgatcataaagctcatcaatcgcatagatactgttccgcttcttgtcatagtgccacctgacataagcgagaggatcaggaccatatccaaagtcaacgccctgccggatgttgtcgaaggagcgaaccatttcatcagtaatgcagccgttctcgattttcaaattatcaaacggcacaacaccactccctaacgcttcgccgagatattcccatctgtactttaatgggttccgttccttaacgatctcagcctcttccttaaaggcttttgagatataaggattttcgagatatgttgaatgatggatatatgtgttctttggtacgaatgaagattcgtattttttgttaacccacgattgctttcttttcggcggattgtatgaatagtaaaaagcataaaaaagaccgtccgggagttcagcccgcaggacggaattttcgatcattgaaatttcttcttcaagtttaaattcggcaagctcttcgacccacaggaaggcaaccggaaattttgcgatcttgagtgatttgatttttgccggatcgtctgcacccctgaagatgatgctgtttcccctgggtttgtacgttagcctcatcggcgatttattgacatgccagtattcacctacgcccagcagatcaattgcctctttaagctgctcgaaaaccgattcccctaatgtgttggcgactttccgaaccacaagtgtactaaccgggtatttcatcatgtcgttgactattcgggtaccaatatgcgtcgatttcgaagagccacggcctccctttaagacataccgaagatatttgtgactgttggctgccgcccagaacgaacggaatttcggcgttacgatgtccgatattcgcttaaccttcgtcaacgtcttcacttcctatatcatcaatgatcgtcacgccgctgtcttttggagcgtctttctcgacttcgttccgtgttttctcgatatttaagcgcatttgttccaatttaaggcgccgttcatcttgctcatgcgccagctggtcaaactgcttgatcagactccggagctcccccattgcccgagattgagcgtttaagagagtcgcatgacgatcccaagcgaactgtatttcaagttcctcttctacaatgtttttctcatatgttagattgccatcttcgtcctcatcttgatgataggcgtattttgcctttttcagctcttttgccgtatcatctttattctgtacaaacataatgcgttgcgcccgtagaatggctgcatattgtatttgaatctgatcccatatcatatcagcaggggaacgttcctgaatctcttccatgatttcaagcgtttcttctggaagatactttgagaagaatccatgtgatacagcattttgatttcttgccggagccgccccgccgctatttcctaatgcgtttttgttgccgggttgcccgcctatttttgtgtgcacacttttttcagggggtgcaccctttttcctttcccaaccatgccgctgcttccacgatttaatggtgttcaccgacaccccgtatttctcggcaaggtccttgtatttcatgcctttgacgtaatccttatacgcctgaatgtgcttttcagccatctacattcaccgccgcccccttctgattcgtgtttgttttggaaaaagatattccctctaaaccgacaccgcactcagaccgttaaccgccaattgtttttctgagatttaccggaatcagtttacagagaacataaaaaagcacccgtaaggatgctttaaaattacattacaaattcgacagagtataattcatcataacgtctaactatattcccgttaagtgtgagagttgcgttgttctttttcccattcacaatcgttttcacaaaatctccttcacttccatccaactctgattcaaacagcataccgtccttaaatttaaacaatacttttaatttcatggtttcacctcccaccttattatcggttaaggagtgtgataaaggaactatttgcaaaatttgtcgaacgaaagcacccttcataaataggtggcaaccgtaagacgaaaaaacacccttttgacagggtgctcatttccgcctatgtttttggaaatccaaaatatcctctttcagaaaaagcctgtcccggggcatttctttcatcggctccagttccccggtctttactaactggttcagatactgacgggtgaaccccaaaatctcaagcgcttcacttgtattgagtatctcttcattcaggaatttcttgatggcgtcacgctctttaggcttgtacatttttgaatcatccttttttctcgcgatatttcaagtaaagggaaaatgctttctcgatgatcgaaacaacaaataaaatgatcaggctaatgtcgagagccgttttcaatggtcccgctgccacatcctgacggaaaaacaacatatacgccaaggcgagaagaacaacaatatcggtggtggactgtacacttttcatttttttgaaagtggctggctttcaagtatttttctttagtcgccgcatttgctatacttggagcaagggagaagcgctaccttctccctcggctcaaaatcatttgcgctttcttggacgtctgcgttttttgattttgggcttttttgttttaagcttttccctgatgatgaggactttttcaacaactgtgagagttgtgaggataatccccagtaccaatgcgatttcagccactttctttccctcctttctatactctaattatacctcatttgtttactcacgtcaagtaatttaatgggcttttttcattatttctccaataaaaaagagcctattcacgctaaacagaataggctgtgatctgctctatttttcattttcaggcgggaacgttcaatgttcttttgtacggttccttttttaatccccaataactgcgctatctcttcgaatgacatgttttgcacagcgtgcatcatgaatatgtctttttctctttcggtaagcacggatagggcatcagcgattctttccttatcccaatcacttacctctccctcagcctcttgaacgattgagtattcttccggcagcgcatcaattaagcgcggatcagcaagaatcgtcctttgatatgcgtctcttctgtcagcacctcggcgggcgcccggctgtcttccgttctgcagccattcaagagtgaattcaatatcgctgatcatgctactgataatctttttgtcgttgatctgttcagccgtcagattgacttcggccgtatctttgtagagccggtacatttttcttgtttctcttaaagcccgtttgtattcaatgattaaatcttgcattctgattcctccccttatttgcgcttaaatgcgccgcccttgcctcgtttaagtctttgcatgtcttgtcccatcatttgccgccaaaagcgttcagatcgctcctgcgcgtttttattgggctttttctttttctgcttcatgtcatccctccgctcaaataaaaaacggacaccaatcagagcacagtgattctgtgcaatgatcagtgtccgcaggctttccgtcttggacttattcagttagattcgttcttattcttctctacatacttatcaatatcttgaaaaaacgccgcggccgtgaatgcgatgattgcgcctattaacgtgatgtttgctttcatgtccggcctgtattcgtactggaaataaaaccagaaacctaaccccatcagcataaaaactattctcagcgccatcgaatcccccttatttgatttgaaatttagctgattctaatgttccgatgtagttccgcttgccggaatcagagtagcagtcaagctggatgacataggttccctttccggtcttattccggatcgttttcacgttgaatgacttcagaggcgttgccgttttgaagctgccccgctgtattaaattcgtatcagtcagcccaccgccactgcgcttcttgtatacgccggccgtataataaagtgtgcttgatccttttttctcggctttccagtccaccgttgaggcgccggccgtgtatgtcgcggcatctgtaaacacccggccgctgtacccggattcattttgccagccggaccatgcggcggaagcagacggcgcaacggccgcggctcccgtaaataatgctgctgatagaatgattgatttgaatatttttttcatgattgttcatccccttagaatttttgagtcattcaacaatttcctaaattttttatgattttctttagaacttcgatatgcgttttgttaaattcgaagatgtgtgcctctgttgacgaatcatacaagtcaactaaatgaccatcggtacatatctctaaacgcttagaatgcctatcacttatttctaaactgttactatccgaaagctctttactcattccgcgccctcctattcctatgatcttagttttgtcttatttatcatgattgtcatgcaccgcagtatgaaaaagggaagtctgatctagcccggtgcgataaagaaatccagcgtagcattttgtcttaaatccgactttctgaagcaaccaacaaggaaaagaaatagttgacgataggccaatcaataaaattaacaaaatgcctgttttccaatctagtttgaatccccacataaaataaatccttcccttcatccttatctcccatcactctccacgccctcctgatttaaaatgatctctttcagatcattcaattcaacgacaaaatcactgaatgcatcgtgcaacggattttccttttgtgatacggcgtctgctcttctctcatatacacttatcagcctttcaacttcttctaatggcgttttcagcctttcgaaattctcttgcactaccgcttcaactaatgaatagcgagaaatattgtttaaaggggcatatttcatattgccagtgtctccccatcttccgtgaaaataaatgatttcagaaataatcacatctttatttcctatccctaacaatgtacagaatgcattgtactgctcatctgtcaatttaagcttcacgccacgccctccttagtaatttctccaccaaactataaacccccaaaacaggagcaggaatactatgactccaatcattccgcaccctccttcttttttaacggataccatccacgaaccaagtacccactgataactgcggtaactgacacacaatttaatctcaaactctgattgtcgaaataatacgccagaactattcctatggaatcggcaacggccgacattatgagaatcatcaacactctaaatgcaaatttcactccgcgccctccaataactcaggatcttggtaaatgtcgccgatgactttatttgtcgccgtctcagaaaacaacggtcggcactcttcttttttctcattgatgatgcaccatgatccgtcaatcattttcacttcgccgatgaacggttccggcccaaacaaaccgccgggcgctgtttcctcctgtttaacgatatcgcccgcataaattcgcttcagtctcgagtgtgtttgaaactgatcagttccattcatgagaacggattttccgtctccgctgtgtgcgatcacaccataacctcctaaccatacagaccatccgaaaacttttccttcaattgaacccaattcaccgatggaaaggcatatgccttcatcaccgcaataacacatctgctcgccatcccatactctgtatgcggccttcataggagcgaaccgtccatgataaggactttaatgtccggatcgttgaaagtccctgaaatataggtgtaagacatcagctctccatcttcaccctttacttgcgaatacataatgagcgcatagtctcgttccacttctcggatttcatcgtcttgaaaattttcgtaatcgtccgtgtcagaaatatactcgttgtaaatcctttcagcatccgcctcgtctttcgctttgataagcgcgtaatatggatcatggatttcatagaatttcattgttcttcccccttcaattgtttggatagtcgctcattttggtgtgacgagtgaataaatatcatttgttccatcaatgatgtcaatttcatgaattccgcctttatatgcccctgctgctatgattcggaatgcaaacagcgttaataactcctggctttcagctttacaccctgcgaatttcgggttagactcgttccggaaaccgatacgcttgttatcctcaacaatcgcatcccagacatcacccctaaactgaatgacatccacctcgaaacctcgattacgaatgctattgattactttgattgccgccgattggattttttgaatatccatcaatacccctcctgctgccgctggtgattgacggcgtttttctccatgtaagccgcttcgatttgctcccatttaaatccgagccgctcaccgagaatgaagaagcttacacaaaggtcgagaaactgcacttcttttccattcatcacctgtaaacggtaagcagtagacatcaaagaagaaaaaagccgctcagtgttaaaaccaatggtagaactcaagtaacttaaatggatggaggatattatctttttgctatttaagcccaacttgttcccaatgctcaagataaaatgcaggcagtccacgtattcctcaagtaatggattcgattcacctatctttcctgagccgttgcagtctcggcattcggaatatggttcagttgcatgtccttcctcgaggtattgcaaattaatatcgtggttttcatcgccagtgccatcacacgtcggacataaacgctctattttcgtccgcggctcccggtcattgctccaatgcttaaagccgcgccattcattcgcacactcggcaagctccacctgtagagcaagaatgaggttcggcagcaagtcctgcccctcaagccccttttctttgatgatccgatcatcaagcactttttgcatttcaaacattttttgtagattcatgattcaactttctcccttctccgtttacgcggaatgcctatttttcttgcatgatagaaataagtatcaatacattcgaaaccgaaatgccgtgcaatttggaagtgggtccaattctggttacgaagctccgtccattcttccagagtaaacaggcgatacggtttctggattactatcccgttagcctttttccagacggaaagagtggatggagagcaatggagttcctctctcgctatttccgtatcagacataccgcgttcatgaagctctcgatattgctcctctgtgaagccgatgtcatcaagtaaagtcacactatttcctcctcggcgcccatgccgcgcccacagtgcgggcaacaggcatctgcgcggatttctaaatcaagtttttataatcgcagtccgggcaatggtattcgatcatgaccgggcctccaaactgaacaatgattgctgaaagtaactttgttcagcagcaaccgggttgatccataacacttcttggcgtttggccccggcttccgctgatacttctcgtatttctcttttccaatgcctgagtcgttcatcgtatattggatgtgcataccctgagagaagaacaggaccagggtgttcatccagcgtctcaagcagttcaacatgatcttctattgtcatttcgtgtttgtaatgccgctttgtccgcgtttcgatgatgtaaggcgggtccgcgtaaacaagaaccccttttcgcttatacctttcaagcagctggactgcgggctgatgttcaatctgagcctctttcagtcgcttggctactaacaatacctttgcaggcagtttaccccactcttttgctgtgtcaggcccgttactactgatcaagctccgccagcctgtccggtcacttgttttcgctcctatggcctgccagcaacgaatgagaaaacgtcgagcgtcctctatttcatcgcctgattcagaatcataggaggcgtaatattcctctctggataacggcgtccattcaattaatctcgcaagctcttccggatgatcccgaatgactttgaaaagattgaccacgctgctatccagatcattgattgtttcgatgatcgagggctgtttattaaaaaacaatgctccggatccaaagaaaggttcaacgtatgttttatgctcgggcatatggctgatgatccagtctgtcatagaccatttactgcccggatagtgtaaaatccgcggaaatcccatcccttaacccccgatcaaattcggcagcacagagatagtgaagaagatgagccccacgcatgccccgaccagccagatacttgttttatcccgtttagcgataatggtatcgccgatcattttgagatcgtcagaacgatcgacaagcgtcgggatgtagtccgggtgaacctttaaaagctcggccgcctgctcgacggtcattgcttcgtccttcgtggccttcacgttccgttgcagttctacttgtaatggcatcattccgcagccccctccagtgcctgagttgcaatatgttcagctatttcaagagaatcaactttaggatttccggctattatatcgagagattttcgatagtgttctttttccttagtaagccgctgaatctcttcccgcgcctgccgaaactgattgaccgtgacttcctgctggcgttggtgttcctcaatgattgcctgctgcttaacagacagttcagttctatcaatcagaaaatcaacatgttctttagtcatccagtattgatctgttgacttagcattttcatagccttttaattttgaaatacgcgctttaatttcctgtaatttatccatgcccgttcctcccccgcaggggaaacccctgctatttgaatttgtggccgatctcgtaatcacaacgagccaggccgccttttattgtttgaatgattgttttaccgtgttccggggcgtccattaaatgagcagtcccttcagtgccatctaaaacgatgatgcgaactttccccggctcgatgctttgctgaatagttgtttcatgattttttatttctgttggcttgttcactctggccgccccctgtgctatgatagaagtaccagttcatatcaaaggcactgaggcgcagcttcggtgcttttttacgttttacgacggcagccgcatcgttaagccggcagatggctttaattcctcacggtagatgattggatgcttttcgacgtatgccgccaactgctccgccgtcattttccactccttaactggaccaggcttgtatggatcgattttttcttgcatagcgataacctcctgaattgattttgggaatttctgaacctccaagctttttgcaatccgctcccatgcggctggcgcatcgtttgtaatcggaacagagcatcatgcaggccatgagcttatcttcttcctgcacccacaacggccgatcgtctacgattaccacgtttcgcagtggtcttccccgcctttcttttgagttttttcagctcgtccagctcaatgaagccgagtgccttatccagcgccagcaccttgagtggcgtctcgtaaagccgctcatacagcttgcgtttgatggcaaattcctttgtttccacgcccttgatatcaatgatctcgatactgccgtcaaggttatgaacctcaaagtctgcaatatattcaatcttccgaaaagtcttgccgttctttttgaatgcctcttgaagcaggaaccgcggctgcagcttaaaatctttgatctgcttgctcatcttgagccatttcagctgttcatagtatttggcttcagcccggctatcgaacgtgatgccgtccacctgtgtttttctggctccgtatttatttgctggcatgtgaggcctccaaaagctctggatcttcataaatgtttccgatgacttcaaattcatcaaaccattcaacaaacgaatgaatattaaagttacggttagttttcacggctcctacgccattaatgaacaattcttcaaaatccttaatatcgaaaacaaacgataagtcatatttgaccgttcccttatgaacctttcctgatttatgttttgctataaagccgtctccctcataaatctcccggccgtttttgtccttcaatccggtgtattgcattaaaggtgatacatttgaaaactcgtttttgaaataacaagctaactcctcttcgtcattattgagaagttcatcccagtcaagcattcgcggaaattcttgaccgtctcttttctctgtatgataagcccgaaacttaatctctctcattcttccgcctccatatctctgactatttccttatcggcccgtttccgcttgccgtcgttacctcccgtcaatttgttcccagtgctgaatctgcttttccttgtatggcgccgtgaagatgatggccggaagcagaataaccgctttaagcactgtgcatcagctccatttgtttgattttttcctcaagcacccggatcgccggggtaaggtcctggccggccgattgctcggcgggcccgaacagatacatgccgccggttgctgtgaagttcgctttttcggtcattcccaatctcctaacctatgatttaattgcatccggtcgcccttaatgatcaccgtgtaatctctgcacatttgatgaatccgggagcccagcgcctcgtcaatatccaaaatttcgcccgtatcaagctcggaagagattagcagaggcttatgattcaggtaccgatagttcacaaccgattgaatttgttccacttgccaatccgtcgcccgcggctcccccttcactggcttgaataagtcatcaatgaacaggacatcggctttccgcatggcgtcgagctttgtttccaactggtcaaagtcatttcgcagatcgcccattccctcaacgtacgggaaatacatgcagtaaattgattttttcttgatcagattgttcatgatcgccgttaacaggtgcgtttttccactgcccggctgcccgagcaaagcgatactgtttgaacgttttcccatgatgttgagaaaatccttatagtattccactgcgcactcataagcgtccttgatcatgtccggcttgccgtctgtaatgaaattaccaaataaaagcatttcaaattcctccgtaatgccgctggccttcataagccgcgcgatcttttttcgttttacacactcgcattgctttgaaaatgtggttttccattcccgggccttatccggcaagcatactttccccgcaagataatcctcttctcttaccatttgatcgggggccaggctttccattgtcttatgctcttttctcagctgacgctctgtgtcttggtgaatccggtaaacgataatgcccttatccttgcagtcagagcactcgtattcagccttttcttctgaggcggcctgtcccactgaagatgctgctgaccgatcccggagcttggttagaatggccttcattgccgcgtccatatcttgcgttttgcgagcttccatactgctgtttctcctttcgtctctggctgaatgggtttgagaggattgcttcaatgtaattcagattgacgttgttgcccttgcttctgaaagcctgtttcattgcttccatgactttctcttcgccgtaatcatccaccatatacccgagccgctgaacctccattgtgccaatggtgcgggctgttttgttttcgaatagttcaaatgcgtttttcattttttcgtcaacctcctgctgtgcttttggcgctgattcttttggcgatgctgcgtctggtatatctgctttaccgttctctgtttcctcattacgcactggattttcaaaagagatcagtttgtatttcccggcctttctcccctgcggctcatattctattcgtttgagctcgattagaatttttcgatgctttattagtgttgcttctgtgatttctattttggcttgaagagtggtatttgaagtggtgaaccactcccgccacccggttttattgttgatgtgcatcagatggaaccataacgcttgtgttgttgcagacaacggattcgtttctaaccaattcatgaagccgttcatttctttcaggtagttcatggctcacctacttcctttcacacagtgctgtcatgccgctgatgcggactaaacgtaagccaggttcatttgttctgagatagccttcgacataatcacggaacagctgggcgcgatttggtgccccttccgtcatccacttgtaacagaaagggatgccaaccttaatcaaatggcaggtcattttcactaatatcaacaggcttaccatcaaaaggatcagcattctgcgcgcttggcttttcttccggtgcttcagcatcaataatctctggctctgccattgcgtcagtaatgtcaatccgctcacgttcctcgttatcctcgatgactgccttttgcatttcaacggagagaatcccccatttactaagcatggatttaagaacggttttaagcgccattgcgtcccagtccttgccccagccaaagtccgacttactaaacttctttttgtgtttctctacttgcgtctttgtccaatacactgttttccggaaaccgtttaaaagctcaaagtaagcagcgtagccaataaccgcatctgattcccgtttttcaaaatcaatctctatttcctcggttagtgggttccacttttgcaattctcctttatggacaggtatgcaattgatagatttatattggcctgtccgcaaagcaagctgaatgtatcctttgtaaccaagctgaaattgcgcgcgccctttatacggaacgatccaggcataacccaagttcttatccactggcagatcaagcgttgccgccaccatagccgatgaaattacactcataggttctgctttttgaagagtattttcactgttgtacagacttaaaattgatgctgtgaattgagacgcccttttccccagaacttcttcaaaccggttcatgactgccggagaagaaagcaggcctttcatcgttgttccctgcggctgccctggcgcgttattctgtttttgaatgttatttttaagtgattcatttgtagccatatttagctaacctccttaattccaaagcgtctgtattgaacttcttttgtgactttctcatatacatctggaaactgctctttcagtttattagtgtcgatccggttagttataaccggtttccagctggtctgatagtttccaatgaatccgtattctgcttccttcatttcgtgcttgatttggttttctaattctttcgcctgcaattgcaattcagcgatgctttcctttaattgcaaatactgctttatccgttcacggtttaccgctgtaagatcaataaccttgttgctttccgtttccgcatacctttttttcagatattcttctgctgcgcttgatccgtccaatgcgggagcaaccccacccaacaccgcagtattccaaaactcgacttcggcagtgaatatcatttcgattaattcatcatcccgctcaatttctttccagacgaatttattgccgccgatcagaacagcaaagtatgcttttttatactcgggaccaagcactccaagatagtgctggacctgaacaatatagtcagcagggatctcgtcattttcccattctttcaagttgtattccgatgtggtcttacattccagaatggccttttctccaacgatcattcggtcaatattcgccaaaatgaaatcatgttcaggatgcttcagcatggaccttttacgcctaacttttttcccgctccgcacttcaaattcttttgcgacaatgtcctcaaggattgagccgaagtaagccgcctcactggctgactcactgaccgggacttgtcccgttttgtccagccataattcaaatgcggttctccatttgtttaaccccaagattacggaggcatctgaaccgccgatgcccttccgtcgctcaagaagccattcgtcccgactcatgtccgctgtcgaagcgaaaacctctgcttgcattaaataatccctgcctttcttttgtatgcttccgcaccaagccgctgccattctcggtatgcgtccattgacgggaaggaaaatacgggtttgcctttactgaacatgattgagccgccgacttctctcaggcgctgttgatcgtccgcccggtcactgaaagctgctgttattcgtttagccatgtataaaacctccattgttttttatggggcgttttggtataataggaatacaatcaattaccaaaacgccttacctagtccactctgccaagtgggcttttttattgcgctgaatgaaacctaaatccgagttgttcctttaaatagcgtttaagattgtcttgtaaaatcatctcgccgctgtcgattacataattatctgctgacgttacttcatccccgaaaaagtccttttttgtttccggttcagtcgccttgtcatgccagttgttcaagaccattggattttcaatattcattgtgaacacctacttacaacactcaggtgaatccctcgggccgccatatttaaaacggtttgatgtaagcgccctttattcgccagtcggctgatatcctctgtaagaaccttgatgctccctgcaagactgatagcttcttcataatcgccatcccgtaacgcctccgatagcatgatagagagctcttccgccgactcgatttttctttttgctgaatctgcatccgatttaagaaactgattgatcttcataccagcaccgcctgcctttcttctgttttcgccattgcaacctgactcattagcgctttccgtgtccacctttcagccagttccttcatgttcagtccatgactacgggccagcgaatatatcagcgttttgtttgccggaattagatcaaaaatctgcttaatatcggccatgggcagttcttcaggttgtcggcctggcctatcgtttgccagccagcgcgctaaatgccttgttgcttgcaatgcttcttcaagctgatgaatcatattgattaccgccgcgcttgcgctctcgttaagtgctggatcaattggtgccgccgtcgtcgggtgaagtttgaaaaggtaatgtaccagatcaatatgttcgtacgcctcgcacgcctcaaaccacttgatgcataattccggagtaagcttactgaatccattttcaacgtccgaaacataccgctgatctttcccccctatcaaattaccaatctgatactgtgcaagtcctgccgctttgcggacactacgcatgatccggggtagattatgcaaattgtatgggttgttctccatatgtttgcctcctgatatatccagttgttcactggtaaaatttaattaatgaagggacaagcttgtccttttctcgaacattaatctccccaaatttgtggagattgtttcaagctgtttctgatgaaatgaatttattcacaaaataaatctgaccttttcccgtaacctttggcgttcgggtagttctaattgaaccatcagggttattcattgttctcttcttaatttcaaagagacccaaatccatacttcgctgtgttggtagattgaaagactcgcctgtcttacgaattaaataaccattatcacggagccattgaaataacttgttaggtccaatctttacgccgttctgttgaatgattttcgctaactcgccaacaagcacagatgattcagatgcttccacggcttcggcaaaaagagcttttggcttcatagattcaatttgcttattttgctcctttagtgcgtgaagagttgttttgaaaaataatttggtattttcgtctgcgttggacaaatacgtctgaatgaactgttcatcatttgcgacatatcccccagtttttctgattgtgggtataacttcaaaggctaaccaatcttgaaattgttcggcaatttgattagatgctctaaaagccagcttgtacaccaatggttcaggaataaaatcacctttctctacttctggaaagttatccggaaggtaagtattcacacggctccatcggattgttacgttgccacttttggcaacggtagtgaggcctaaattccgagcaacttgctcggcatcaaaaaggatttgatcattctcaattttggctgcaacttcgaaaatttcatttttgaatgtttgtaaattattcatgcagaagctcctttctgatagtatgcggtgttctcagcaacccaacgcgtgttgctctcaatccatttaaaaagcaaagtcgtagggacttttttgccacattcttcgttaaccggaaaatccggacgggccatcagttccgccattttagtgggaccgcaccgcagcacctccatcgcttcagttctcgtcaagatgtgaggaagctggttcaaagagctgagccgctctaccagcatgtctgttgctctatcagcaattttggcagcgatctgttcaatgaatttctcatcgtattgcatagtgaacatataaaaaacctcctttacaatgagctttataatctctcactttcatgtggtaaaatatgcatggaaggtggtgagatttaatggcttctactaaggtttacgcttgcctttgtggtgaatgggttgacttgactagtgatccggactgcaaaataggtgaatctatgtcttctccatacatatggtgggaagaaggtgcttcaatttggagccctaattctaaagaagagcacacgatgtatcagcaagattacgttaatatttattacaaaaatgctgaatatcgcattcacccaatgtttatccaaatcaagtattcatcctaaattcacgtttaaggttagcttctaacagttctgggtcgtcaaactgcaatttggcggctttagaactgaacagtacgtccacatgttgtttaacacggaaccactcggattgagtcataccattcaataaatttttaatttgttccagctttttttgatccataattttgacctcctatgctgtaggggaatccttttttcatccctagcatttttttagaacctctgataagcacgattcgtgaagttgttctgtaaaaaaaatttcttgaacggacttgttgtagtatttagcaattttcatcttaatttcatcacgaggtatacgtttacctgactcatacatcgctaaagcactctcgcttatctccagagcctcagcgatgtgagatcgcggttttttatttctgagctcttggagtttagctccaatgatctgtttattcatttagcaccatcctttacatttcgtgttgttctgaaatctatattaaaccgcacattacgtaaagtcaagacgttttgtgaagttttttctaaaaagtcacgaatcgtgatattatactaaataggtgatgtatatgagatttggcgaccaattaagacaattaagaaagcaaagaaagctttcacaaaagagtttagggcaaaaattcggcttggctgaaagcactataagcatgtatgaaaggaacgaaagagaacccgattatgctactcttgttaagtttgcagatttttttgatgtttccacggattttctgctgagaggagaagattattatagagataaggcccgagaactccgcaaacaaaatgatgtccgatttgccgctgtcgatggtcgggagttctctgatagtgaaaaagaggagattcttgctgacgcattaaggcgcattgacggaatcgaaaaaattattgaagagagattcaaaaagaagaatgaagataagaattaattatttattattgttttgtttagtttaaataatgctgaacagatcgctttaatttttaaagtttagtgttaagttgactgatgttcaactttaatttttaaagcgaagcttgtaatgaaaccttcagttattttcctttcaaatgaacttagcttttttagcacacctcatgaaattattagcaaaattggtaattaccccttgaattttcaacaattatagtcgattatatataggtattctattatatgaactgggggaatcaggttgaaaaagtggttagttttattcatgtctctgggcttggctctagctttagcagcatgcgggtcgacagacgatgtctctactggcagcagtgattcaaaagacaaaaaaactgaagagaagaaagacgacagctccaaaaagattgacgctagtaagcaatctacagaagcactaggaatgaaaattaacctgggcgacgtcaagattatgaaagataaaataaatgttgggcttaacattgaaaacactacaggaaaagtccttactttttatcccgatcaaggtaatgcagtcattggcagcatgcaattatcggcaaatatgttcctgactgacggagaagtcggcggagacgttcaaggcggagtgaaacaggaaggtgtacttgagttttcagcgccggacggaaaagaaattgatgttgataaagtcaaagaaatcaaattaaatttcggtgatgtggtcacagatgacttcatgaaaactaaagcagtaacaatcactgtaccagttaagtaagggagagttaacaatgaaaagaacaacagaatttgttttaggcttattgggcggaattttcggttttattggagcaattatggcattaattatcggtggactcgatgcctcttttaattcaagtggcacaagcgatataattggtttgggctggggcgctgttttcttatcaatcttaggcatcgttgcttcagttgtagttaagaagaaacctaaagtcggtggagtattacttctcatttcaggaatcggtggattgatttgtatatccctcttctatttactacctgctgttcttcttattatccctggtatcatgggacttgtcagaaaagataaaacagtaacgacagcagcttaaagaaaggcccttgatagggcttttcttttccagtaaacacagaacaaacgttcttaataattctactataatctatttatggacacatttaccggtgtaaaatggtacatttttcccctataattacatacaagcaaacatatttaccacattttaagcattgacaaggtaatgagggggtcaattacagcatggggtatacacaaagagtcacttagaggattggatcgaaagtttcctcagggaacacaaaataacaacgcctttagaacttaaacttgttaaattatgcaggaagctcaatgtatttgtactttttgatgatcgggaaagttatatgttagatattgggggtgttcatatcgtaggcataaacaaccggttaagctatcaacagcaacgatcggatttagctcatgagttatggcacatcttattagaaggcggcgacaacgagcttatgccgccccactggaaacagtatcaagaatcaaaagcaggttatttttcatatcacttttgtgtcccaacattcatgctgcgacagatgaacttacctgcagatgaggaagccgctgcacggttggtatcagatacttttaaggtaacttttgattttgcaaaaaagagactaagaatttactttaataaattaaactatcgttaaggaggattaaaatggttgtctttaaaaaggagaaatcaaagcgttcatctaaaggatatacttggtattttgtgatggaaaacggccgcgatccaagaacaggaaaacgcagacaaataaaaagacgtggtttcctatcaaaagcatcagccgaagccgcttatcttgaattgaaaacgaagctcctttcagggattgatgtcgggaaagagaacattctttttcaggaaatcaaagacctatggtacaaggaatacaagcataccgtcaaagtcagtaccctgcgagcacgaaaaagtgaaatagagagtttagaagaatacttcggaaagatgaaaattaaagacataaccaggggtgtttatcagaagtttttagattatctgagagaggaaaattattccttcaatacaataagtggtatccacactacagcaagtatgatcttcaaatacgcgaggcaggaggacatcataagtaaaagcccgacggaatttgtaaaacctcagcgtccaaagctcacagtagaagatattgaatcacaagaagaagccgaaaactttcttgaaggggaagaacttgtagagtttttagaccttacagagaaacacggcctttttctcgactttgaatatttctgcatggctgcatttacaggcactcgttccggggagcgattggccggcaaatggagagacttaactttagagggagacgacctcaaaacatttcgagttaccaaaacgctttattgcccatcaaacaaagcatctgactatgaactgctgccaccgaaaacgccagctgctgttcgggatgttcctttgtcagactttctagcatctctgttgaaaaggctaaagctcaaacaagctaaaatagcatacgcgaatggacgcacattcagtgatgatgattttatattcgctcgtcctgacggccaccctgagaacattaaaaagatggataccagaatgagaaggattttaaaacgaatggacataaacaaacatattacccaacatacttttaggcatacattcacttcgcttgctgctgaggcagatgtacctttggaagagatacaaaaaatactaggccatcaaaatgatgacataacgaaaaaagtctatttacacactactagaaaaaccaaagaaagaacttcgcaaaaattcaattcattcataggtgacctctcaatgaaaatacagttatcatgactcctatgtgaccaaaatgtgaccaatttcataaaacaaaaagaaaaaccccttgaaatcaaggggtttcggcattctttacatcattccgcccataccgcccatgccgcccatgtcaggcattcctgcgccgccggcattttcttctggtttgtcagcaacaaccgcttcagttgttaatagcattgctgctacagaagctgcgttttgaagtgcagaacgtgtaacttttgtcgggtcaacgattcctttttcgatcatgtttacccattcgccagttgcagcgttgaagcctacgccgatttcttcgtttttcaggcgctcaacgatgacagatccttcaagaccagcgttgtgcgcgatttgacggatcggctcttcaagcgcgcgaagcacgatgttgatacctgtttgcgcatcgccttcagcttcaactgcagcgactttgttatatacgttgacaagcgctgtaccaccgccggatacgatgccttcttcaacagctgcgcgagttgagttgagggcgtcttcgatgcgaagtttacgctctttcagctcagtttcagtcgcagcgccgactttgatgacagctacgccgccagcaagtttcgcaagacgctcttgtaatttttctctgtcgaattcagaagttgtttcttccacttgagcacggatttggttgacgcgtgcagcaattttttcagtatcgccggcgccttctacgattgttgtgttttctttcgttaccacaactttagaagcgcgtcccaattgtccgatttcagtagatttcaggtcaagacctaaatcttctgtgatgacttctccgccagtaagaacagagatgtcttcaagcattgctttacgacggtcaccgaagccaggagctttaacggcaacagcgttgaatgtgccgcgaagtttgttgacaacgagtgtagcaagagcttcaccttcaacatcttcagcgatcagaagcaatggtttgccttgctgtacaacttgctcaagcacaggaaggatttcttgaatgtttgtgatttttttgtctgtgattaagatgtaaggattatcaagaaccgcttccatcttatcagagtcagtcaccatgtaaggagacgcatatccgcggtcgaattgcataccttcaaccacttcaagctcagttgtgaagcctttagactcttcgattgtgataacgccgtcgtttcctacgcgctccattgcttcagcgataaggcttccgacttcctcatcagcagcagagattgcagcaacctgagcgatagactctttgccttcgatcggcttagaaatttcttttaagttttcgattgccacggttacggcttgttccatacctttacgcacgccgacaggattagctcccgcagttacgtttttaaggccttcgcggatcatagcctgtgcaagcacagtcgcagtcgtcgtaccgtcaccggcaacgtcgtttgttttgctggctacttcagctacaagcttcgcacccatgttttcaaacgcatcttcaagttcaatttcttttgcgattgtcacaccgtcatttgtaattaacggagaaccgaattttttctccagaaccacgttgcgtccttttggccctaaagttacttttacagcgtcagcaagcgcatcgacaccgcgaagcatagcgcggcgtgcttcttcactaaacttaatatcttttgccatgttaacgaaacctcctcgaatttttaaaaatatttatttgcttagccgataacagctaaaatgtcgctttcacgtaagattaagtattcagcaccttcgtatttcacttcagtaccggcgtattttgagaagataatgcggtcgccctcttttacttctaaagcaacgcgctctccgctttccaacacgcgacctgaaccagctgccacgattttgccttcttgcggcttttcttttgcagaatccggtaatacgattccgctggcagttttttcttcagattctacgagttcaatgacaacgcgatcacctaatggctttaacaatgtaataacctcctcaatagtatgaatatgtaattttagcactcagctctaaagagtgctaacacatttattataataaagaatctcacttccaatttcaagtcataagaataaaaaattttcacgcttacatgattctctcttacaccgattttctccttttttcacgtcaagttcacttgtgttacaataagaacaaataagttgattttataggataaaggagtacatatcatttgagaaaacagtattggtatatcattttgacatatgttatcatgcagctttccgcattgatcggcattcctttaatgtacagattcggctatgcgggcgggcagcctacgaatgcgaatctcaccatggctcaggggatttattccgtcgtaagcttttttatctgcctgattatcgttctcctgattttgagaaccgcgccgaagcagacattaagaaacgggaagaaagcatccgccggcatgtccattctttgggcggtcgcgggaatatggctcgctttattttctcagggaattgccgggatgattgagcagtatgtctttcacgtgaacagcggttcggaaaacacgaaagccattctcaacattatcaaagccatgccgcttatgattatcgtttcttctatcgtcggtccgattcttgaagaaatcattttccggaagatcatcttcggtgtattatatgaaaaaacgaatttctttatcgccggactgatcagttccgtcattttcggcattgtgcaccaggacctcacacacctgctgctttacacggccatgggctttacctttgcgttcttgtatgtgcagacgaaacggattattgtgccgatattcgcccatgtcatgatgaataccattgtcgtggtcatgcagctcggccccgcccaaaaatatattgaacagcatagtgagcaaatgcaattaattattggaggattgtttgtatgaggaacccaatgacttggggcttgatttatttcgcagtcggctgtatctttacgtatttggccgcaagctcgccgggaagcatgtggtctttttattccatactgctgatggttttcgccgcttataatatcagcatctcgtttaaaatgttcgctttctcatttaaagtgaagaaaaatcaaaaataaaagaaaagccatttctcatcattgagaaatggctttttttatgctgatacatcctggtcagattcgctgctgccggtctgctttttccgatatgcggcttttgaaataagaatactgatctcgtataaaatgcaaagcggaatcgtaatcatcatgtgagacagcagctcaggcggcgcaatcatcgcggcgatcacaagcagcacaaaatacgcgtacttcctgattttcgataaaaacatcggcgttacaacaccgagcctcgtcaaaaacatgatcagcaccggcatctgaaacagcagcccgaacggaattgtcagctgcagcagaaaatgaaagtactcgctgattccgatcacctgattgacatccaagtcattcgaaacccgcttcataaaatcaacgaccagcggaaataaaatataataagaaaatgacacaccgctgacaaacagcacgattgaaatcggaatatagctgagtgttactttgcgttccttctcatacagccccggactgacaaacgcccaaatctgatatagaataatcggcgaagtcaaaatgatgccgataataaacgcgaactgcaaaaagataaacagcggatccgtcaggttaaaagcattaagggtgagctcttttacttcatcggctttttgaagatacacaatgataggttttgccagaaaaaagccggcaataaagaaaaccgcaaaggataacgccacaatcagcaatcgtttccgaagttcggcaatatgctccacaagcgtcatttgattcactctcatacgtgtcatcctatcttactgttcttctttctttttttcctcttcttcaccggctaatcctttagtagcgttcttaaattctcgaagcgtgtcccccgcagcttttcctaattcgggaagcttcttcggaccgaaaataatcaccgccaccacaccgataaccgccaggcttccaggaccgatcatgtgcagctcctcctttcgttattcaatttcttccaaaacagaataatgctttaagaaataaaccaatgattgaagctctacagctaaatctatatgatgaattcgaatgtgatccggcacattcaaacgggccggcgtaaagttaaggattcccttgattccgagcgccacgagccggtcggtgattgactgagcggcaaccgccggaacggtgagaatcgccacgggttcatccttaatgtgaagctctaaatcatcaagatcaaagacaggcacaccgcctacctcagttcctattttactctgattcacatcaaaagccatagatatttttgtgttattattttttgtgaaattatagtgaagaaacgctgtccctaaattcccgacaccgatcaaaatgacatttgtcgtttcatcctgatccagtgtttttctgaaaaatgacagcaggtaatccacattatagccgtatccttttttgccgagcgccccgaaataggaaaaatcccggcggatcgtggccgaatcgacttttaccgcatcgctcagttcagctgaggaaacacgctgctttcctgacgcgtgtaaattctttaaaaagcgataataaagcggcagccgttttgccgtcgcctgcggaatttttgattgatccttgttcatgattggtcctccactttatactcagatgcatctcttttaaaatcaccgtttttgccgcccgttttttccatgaggcaggtcgggccgatgaccattcctttatccagcgccttgcacatgtcataaacggtcaatgcgcagactgaagcggaagttagcgcttccatttccacacctgtactccctttcgtttttacgcttgcctgtatatgaagaacggcttcggaatccttttcctcccagccgaatgaaatgtcgacgctgcttaaagaaagcgggtggcacatcgggataatcgctgacgtctgctttgcagccatgattccggccacctgtgcgacagccagcacgtctccttttccgatctcccggtttttgattctgctgtacacgtcatgcttcatgtgtacgctcgatatcgcagcggcagtacggactgttgaagatttatcgcttatatccaccatgcgggcacggccttcttcattaaaatgagaaaatccattcatatttaaactctccttacttctgatcatacactattttctccctgatgtcttatcctataatgttccaattctgatgtattgtttgctgacagcaggttgataagctacacttaacttattataacagaggtgaaataatatgatgatcttacaaattaatcagctatccaaatcttttggcgctgatcctattttaaacaatataaagcttgaagtcagatcccgggatcgcatcgccattgtaggcagaaacggagccggcaaatcaactctccttaaaattatcgcaggtcacctttcatatgaaaagggtgaattaatcaaaccgaaagaattaacgatgggataccttgcccagcacacaggcatggaatctcagcttaccataaaagaagaattgctgagtgtttttgatttcctgaaagcaatggaaaaagaaatgcgctctattgaagaaaagatggccactgccgccccggcggagcttgagacgctgatgaaaacctatgacaggcttcagcaggacttcaagaataaaggcggctatcaatatgaagcggatgtccggtctgtccttcacggcctcggcttcggcaaatttgacgattccgtgaaagtgcaaagcctgagcggcggtcagaaaacaaggcttgctctcggaaagctccttttgacccagcctgatctgcttattttggatgaaccgacgaaccatctcgacatcgacacgctcacatggcttgagcattatttacagggatattctggcgccatcctgatcgtctcccacgacagatactttcttgataaagtcgtcagccaagtgtacgaggtctcacggacagaaagcaaaaaatacctcggcaactacagcgcctatttagaacaaaaagccgagcagtacgagaaagacctgaagctgtatgaaaaacagcaggacgaaatcgccaagcttcaagattttgtcgaccgcaatctggccagagcatcaacaacgaaaagagcccagagcagacgaaaacagcttgaacggatggatgtcatggcaaagccgctcggtgatgaaaaatcagcagccttccgttttgaaattacaaaacagagcggcaacgacgtgcttcgcgtacaggatgtctccatcagctacgacggccagcctccgcttttgaaaaacctgaccttcggcgttacaagaggcgaaagcgccgcccttgtcggacccaacggaatcggcaagtcaaccttgctgaaaaccattatgaacacgctcagtccggaatccgggtcgatctcgtacggttccaatgtcacaatcggctattacgatcaggagcaggctgaactgacctcgtccaaacgcgtcttggacgagctgtgggatgaatatccggacatgccggaaaaagagatcaggacatgcctcggcaattttctgttcagcggggacgatgtcttaaaaccggtccgttctttaagcggcggtgagaaagcaagagtcgcgcttgccaagctgatgcttcaaaaagcaaactttctcatccttgatgaaccgacaaaccaccttgacctcgacagtaaagaagtgctggaaaacgccctgatcgactatccgggcacactgttatttgtatcgcatgaccgctactttattaacaggatcgccacaagggtgcttgagctgtctcaagaccatgcagaagaatatttgggagactatgactattacaccgagaaaaaagcccagcagctcgaactggaagaaatgaagcggcaggaaaaggagcaagcacagcctgccggcaaggtcaaacaggacacgaaaagaacatatgaagaagaaaaagaatggaagaagaaagagcggcagcgcctgagacgcattgaagaaatcgaagcggccgtctcatccgctgaagagaaaatcagcgccaatgaggagctgctgtgcgaccctgaggtgtatcaggatcatgaaaaagtacagaccattcacgctgagaacgaagcactgaatcaagagctggaacaattattagcggaatgggaagaactctcatcagaagaatagtaaaagtcaagcacctctttaaggggtgcttttttatccacatctttcttccttgtcagccatttaagtaagcgctttatacacactatccacaaaattttctgactttatccactttactcacaactcgcagccccttatccagtatggatttctgaatatatacacaatcctgtggatatgtttgaattatctgttaataagtcaaaaaaagcctcacgttttacaacgtgagacgatcaaaagacattaattccaaaccaggctgtccgttcatatcgtatgaaccccgaatccccttttcaaaagcaacagttccggcagccgcaatcatcgctgcattgtccgtgcataaagaaagcggcgggatgataagttcaggatctcccgcatggctgaattcctgctgcagcgcggctctcaagcccttgttcgcggctacgccccctgcaagcagcacttgtttaactccgtattctttggcggccttagaggtttttgccgtcagtacatcaatgacactctgctgaaagctcgcggcaagatcctccggaggaatcacctcatttttttgcgaggcgttatgaagcgtgttaatcacggctgactttaagccgctgaagctgaaattgtaagatccttcttccagccacgcgcgcggaagcggaatggagtccgttcccacagcagccagcttatcaatctgcggccctcccggataaggaagccccatcgttcttgccactttgtcgtatgcttcacctgctgcatcgtccagcgtttcaccgataacatcgaaggaaccgtgctctttcatatagaccaattccgtatgtccgcccgacacaaccaaagcaagcgccgggaactgaagctctcctatcagcctgtttgcataaatatggccggcaatatgatgaacgccgactaacggaatttgatgggcgaagcttaacgcctttgccgcattgacgccgattaaaagagccccgacaagacccggtccttccgttacggcaatcgcgtcaaggtcatctaagcccaactccgcttgtaaaagagcttcctcaatcacaagggtaatctgttccacatgatgtctggacgcaatttcaggtacgaccccgccgaaccgtttatggctttcaatttgagaagcgacaacgtttgaaatgatgtctttcccgtttttcacgactgaagccgctgtttcatcacagcttgtttcgattcctaatacatatatatcttgtttttcactcatgtaatgtcacccacattaataacgcatcttccccgttatctgtatagtattgttttctgattcctccggcctgaagaccgaattttttatataaggattgggcgggatgatttgagaccctgacttcgagagagagccttcttgcctttttttctctgcacaattctatcgcagagccaaacagcgcttctcccaatgattggccccggtattccggcttaatggctatgttcgtaatctgcgcgtcatctataataatccagattccgcaataacctgccagacagccgtccttttcaatgacaaggtagtgcgcatacggattttccaaaagctcatgataaaatgaatccttcgtccacggagaagtgaaggatgctgtttcaatttcataaatttgatcaatatcttccggccgcatgcttcgaatcgccgttttcgttttcatccccatcaccctatttttgagattccatccatttcgcttcagcctctgccagacgcaaataatccggaacaaggctgtggacatccgcttcttctttttccaagcctaaaaacgccagctctgacggccgcggattatgctgcgcagccgttcctatcactgcttgagaagccaattcatgtttaatggtttcttcatgaatggctgtatcgtgccctaaaaataaaaccggagacgctttttctctcagcatgccaagccaatcagtcaaaagcacattctggtcaggaagaacggattgtaatcggccgtcctgatattcataaagacccgtatacacttgtccgcgacgggcgtcaaataacgggcagatcagcccttgaaagtgccgtccgttagccgccagcacctccaggctcgatacagcggaaatcggaagcttcagcgaccaggccaatgtcttcgccagcgtcacaccgattctgacacctgtgtacgatcccggccctttcgccactactattttcgtaaggtcctgcggtgttaaaccgcaatccgccagcaatgaattgacagcaggcatcgcccgcacggaatgattcttttttaaatatgtaatatactccgccatcaccgttttttcacgaacgagcgcggcacccagcgtgtaatttgacgtatcaattgccagtattgtcatgtttacttatctcctcacaaagcgtttcataccgtgttccgcaagccgtaaaggtaatgtccctttcctcatcaccggctctcttgatgacgatctgcagccgttcgacaggcagctgctcctgaattaaatgagcccattcaattaaacagacgccttgtccctcaaagtattcttcaagtcccaagtcttcgctttcatcctccatgcgataaacatccatatgatatagaggaagcgaaccgtcatggtattcttttataattgtgaaagtcgggctgtttaccactctcgtgatccccagaccttcggcaaaaccctttgtaaaagtcgtttttcccgcgcctaagtcgccttccagtgtcagaatatctcccggctttgccaaagaagcggcaagcttggcaacggcttttgtttcttcggggtttttcgttctccattgtaatgtcttcaaagtgagtcacccgtcttatttaaaatgattgtatccttttttctcaaggacgatttgtctctgatcattggctgtcataagaacacttgcttccttccgttcagaaactgctccaatcttagcaatcggaatgcctgattgagtgcagtaatcaagcaaagaagtccactcttgctgagataccgttccaaccaattcaaaatcttcaccgccgaataacacccatttctcccactgaggatccgcctcaggtaaatccggatgcacgggcagaagctgttcttcaatttctatcgtaactgaacttgactcagctatttcatgcagctcactggccaatccgtcactgatatcattcagagccgctcgctgaagctgggagcaaaagcggccgacctggaccctcggaacgggccgtttatgttttttgataaaataatcactcgtgtgaaaagcagagggaggtgtttctcccaataaaagagacagcccagctgcggacgaaccgatatctcccgtaacaaaaacaacatccccgggccttgccgagcttcgcagacaagcgcgatccttttcgacttctccgatgacagtaacagtaataacggcttgaccggaagcggagacggtatctcctccgatcaaatccatccggtatagtttcgccagttccgccatcccttcatacattgcctggacatcagctttctgccagcaagaaggaaccgcaagagataccagataaaacttcggaatgcctcccatcgccgccacatcactaatgttaacagcaagcgccttataaccgatatcttgaggagaggaatactctgatttaaaatggacatcctccaccatcgtatcaaggcagacaatttgctgcatatgagatgatgctgtataaactgcaccatcatcaccgatccctacattgacggaaggatgataatgcgtatgcggcgtaatactgtgaatcaaatcaaactcgtccatgtttctcccgtctccctttctgacgctcttgtgaacagctctttctagtgtatcggattatgtttcaatatccaagactttaacgatataaaagaaagcttggttagataccaagctgccagcatttaaaagaaaacacaaaaaaaacgaaaacatgatcgtttcgtttacaatgagttgctctatccagctgagctactgggacaagattttgctttatgtatcagcgacaagatttattatatacaggttcatatcataagtcaatattttttcagaaactttttatggggaagaaagaaatcttccccatcacatgttaaaagctgattgtattctcaagtccttcaattcctgacctgtttcgtcgtaaaaagccatggcgccttcactttctgtgagagtaagaatggcatagcttttcacattgcggactctcggaaggcggatgctccccgggttaatcaaaagcttgccccgaagcacttcacttccggcaatatgcgagtggccgaagcagacaatatccgctccaagctcttccgcccggtaaaaaacagttaaaagtgactgtttaatgccgtgaagatgtccgtgaacggccaggattttctttgaaccggcatccagcaggagttcgtcctgaaatccgcccccaaagtcgcagttgcctttcaccgtatgatacggtgtgagcgcaggatgtgcggcgtcaagctctgaatcaccgcaatgaatcatcagatccacttcgtcttcgtgccgcttcgcgatcgtttccagttcgtcttcaaggccgtgactgtcacttatcatcagcactttcattgcattacgctcccccttacgcatcaagcagctttgacagtttcttgagcgcttcagccctgtggctgattttgtttttctcagcgcttgtcagctgggccatggttttatctttatcctttacaataaaaatgggatcatagccgaacccgttatctccctcgggttcttctgcaatatatccttcaacatggccttcgaccgttttggtttcctgccccggcatgctgacggcaagggcgcagcggaaacgggccgtacgctgctctttttcgatgccttttaattctgacagcaccttgtccatattcgctttatcatcttttgcttcgcctgcataacgggctgaataaacgcccggtctgcctcccaggttgtccactgataaaccggagtcgtccgcaatgaccattttgtttacggcttttgccaccgcttccgcttttaaaatggcgttttcttcaaaggtatgtccggtttcttcaatttcttccgtaaatccgatttccgccaaagaagagacactgtagcctttcggttcgagtatttctttaaattctttcacttttcccggattgtgtgtcgcaataatggcttctttcacgctgatcaggcctctctttctttatttcagttcaggcaatgtatctccaagcacttctttttgtttttgaataagcgtctggattcctttttcggcaaggcttaacagtccgtttaaatcttcacgggagaatgtggcttcttcgcccgtcccttgaagctccacaaaacgtccgcttcccgtcatgatgatattcatatcgacttcagccgctgagtcctcttcataattcagatccaaaagaaggccttcttctttatccatcccgacagaaatggccgcgagatagtctgtcacaggagaggttttgataacgccgctttttacgagtttgccggccgcaatggccattgccaagaaggcgccggtaatggaagccgttcttgttccgccgtccgcttgaatgacgtcacagtcgatccagatcgtccgttcgccgagcttctccaaatcaacgacggcccggagcgcgcgcccgatcagacgctggatttccatcgttcttccggaaacctttccttttgaagattctcttatcgttctttgattcgtggcgcggggaagcatgctgtattccgctgtgatccagccttttcctccgccgcgtaaaaatggcggcacccggtcttccactgatgcattacagatgacctttgtatttcccgctgtaattaacacagagccctccgggtgagtgataaaatccaaatcaaatgtgataggtcgcagctcatcgtgctgtcttccgtcgtgtctcatattttacctccgattatatgtacataaaccttttgttccggattgtgaataaagaaagaggcagccggaacgctaacctcttttttactagtatatcaaaaatcgcaaattaaaaactacccgtattcacttgggacggcctcgaaacaggttttgaaagggattctcctttttcattcaccagttctgattttccgtttacttttatagaaacactttttatcgacggctgttctgttaatgtgaggacgatgctatccagcacgcccgatgataccatttttgttttttcatcggcgcttccgtaaatagagctgttaaaatcaagtgtaacctggccgtcttttactttcggcttactgaggagcttaacatcgttattaaagtccgtcaaaagcccgcttgctttgcccggtccgtcggcgagctgctcaacggctgcggtgatgtcgtttgtttctgaattgtcaatccgctttgtgacaggcacgtagtattcactggtctctgtttccgccagataatacacagtcagcggatgggtgtctgtcagatcattcactccggcggtttcaatattaattccgtcttttctgcttaagtcgcccgtaatcggcgtgccgcccacaggcatttctttcagttcatgcccgttgattctgattttgactttatctattgagctgaattgggtaagcgtccatgtaatcgattgcaggattttttgttcgtcttcttttttgtagtttttaaattccttcgaaaaatcagcgacggcggtaccgtcttttttaatgtcaacatttaccgtcgtatccgcagggagcaccgctctgaagccattcggcaggatttctgacacaggccctccctgaaccaaatactcaagggcctgctttgcggttccctcactgttcggaagaggcagtgtctgtgctgcgacatagccgtttttatcaatcagatacagctctctcatgactgtattggccggctgatcggctttagatgtgccgtttttttctgactgcgttgattttgcctgaattcccgcttcatcttttacatatgaaatgtcttgaggcgggtcaatttccccggctgttttatcggattgaaacaaaccgcatcctgataatacaaaagccgaagtaagacatgttgcagcaatgactgcaggtccttttttcagcatacttttccctcctaaggctgtttgtactatgatgtatacgagccctgtgcgggaaatagaccgggatgcgcaaaaaaacccgccgtaaacagcgggttttttgatttattttctgatcggctcttgaagggagatgcactcgacatggccgatttcatgaccgaaccagtcttcggcaatttttgcgaagccgttccgctctcccgttgttagaaactgatgctccggtgcatgtttcgattggtttaacaagcctttataagacaaaatcgtgctcacttctctcgctgtctcgtctccggaggaaatgattttcacatgctttcccatataatcttgaatcggatcttttaaaatcggataatgcgtgcaccctaaaatcaaggtgtcaattgctgtaccttttaaaggctcaagcgatgcttcgaccgcttccgccgccgattcctgaagaaaccgtccgctttccacaaacggcaccagcagcgggcaagctgtgttctcgacttgaaggtctgcatttaatccgagcagcgcctgctcatacgctcggcttttaatggtatttatcgtgccgatgacgccgatatgctgatttttcgtgaccttgatcgctgttctcgcacccggctgaatgacgccgacaaccggaatatccgttttgcgctgaatatcctccaaggcaatggccgtggccgtattacaagcaatcacgagcattttgatatggtggttttccagcaggtaatcggtcatttcccacgtgtattgaagaacttcttcttcaggacgcgggccgtacgggcagcgttttgtatctcccacatagatgatattttccttcggtagctgtctcatgatttccttggcaacggttaacccgccaaccccggaatcaatgactcctatcggctgttccaacaaaatcgcctcattttcttttcatttcatgctgcagtttcaataatgacttttcgaagagggctgtttcttcttcggaaaatgtctcaaacatatcccgcaaataagcctgtcttttcaaaatcacttcctggataatgcgctctccttcagcgagaagatgaattctgacgacacgtctgtcagccgggtcttttacccgctcgacaagcttatttttttccatgcggtctatcagatccgtcgtcgtgctgcaagccaaatacattttgcctgataattcgcctattgtcatatcccccaattcataaagccattgaagccccacgaattgcggcggtgtaattgaatattggttaaggatctctcttcctttttgtttaatgatcgcagcgatatggcggagtgatttttcgatatccgcaacatgctctacagattttgatgtcatttgtccatccctcactcaaggatctttctgggctatgcgctccgtgtctattttccttctttttttaagaaaatgcaagactgacggagaaaaagggaaagccgggattttcaccgcatgcccattttcctgggcgccaacacaaataaccggctccttctcgtaaagaaggaaaaccggcaagaatcagagctctagctcacccattctaagaagctcgacaacagcttgcgaacgccctttcacacctaacttctgcatggcatttgaaatgtgattccgtacagttttttcactgataaatagctcgcttgcaatttcctttgttgtcttgtcttgaacgagcaattcgaatacttctctttctcttttggtcagcagcggctttgattgaaaatctttctccttcaagtattgtaaccctccttgctaaggtgagagcgaatctgaaacgaatgggtttatatagtcaagatatcatatgtaaagggcgcttcggaggtgacgtcacttagagaaatagttatccgctcaggagagcagaatgcctttctcccgctccgtccagctgaccgctttgccgcttgtctttgacacttgaaccataacgacggaaccggtaaaacacggcaggcctgactcattttctccaaggtaatgaagggtgacggacgcatttccgacagagcttgctttgacatgaatccgcaggttttcatacggcatcacctgacgcatatagtcgcactgctggcttgcgacgaccgtcatcgtttccgagttttgcgctgatatgccccgctgcttaaaataagcgatccgggcttcttcaaaatagatgaaagggattacattattcatatggccgaacatatccgtttctgaaaaccgaaccgtcacttcagtgaagaaagaaaacgactgtctccactcttcaaacgggatgtcaatatattgcggttgtttcatcaccttcagctccttataaaaaaacctctcccgtgcggaagaggctctttttttctttcttatactctgtcgcttccgaagaaatttcggaatgcttgtaaattcgtatctctgttcaaagcagcgattgaagtcgtgagcggaatgcctttcgggcaggattgaacacagttttgtgaattcccgcaatctccgagaccgccgtctgtcattaaagcttctaaacgttctgacttgttcatcgcgcccgtcggatgggcgttaaacagacgcacttgcgacatcggggcaggccccatgaattttgatttgctgttgacattcgggcaggcttcgaggcagacgccgcatgtcatgcatttagacaattcatatgcccactggcggcgtttttccggcattctcggtcccggtcccaaatcgtaagtcccgtcaatcggcacccatgctttcacttttttcagtgaatcaaacattctgctgcggtcaacctgaaggtcacggacaaccgggaatgttttcatcggtttcagacggatcggctgttccagcttatcaaccagcgccgtacatgactggcgcggtcttccgttgatgaccatggagcaggcgccgcatacttcctcaagacagttcatgtcccatgcaaccggcgtcgttttctccccttttgcattaacgggatttctgcggatttccatcagggcagaaatcacattcagattcggacggtaattgatttcaaattcttcatcgtatggcgcgctttcgggcgtatcctggcgtgtaatgataaaccgtatctttttctcactcatgattatttcgccaccttcttcttcgagtagtcgcgtttacggggcgcaatcagtgatacatcgacatcctgatattcaaattccggagcttcaaacggaccggcatgtttagccattgtcgttttgagccactcatcgtcatttctttcagggaaatccggtttatagtgcgctccccggctttcatttcggttatatgcgccgagcgtgatgactctggcaagctgaagcatgttggagaactgacgggtgaacattgccccttggttgctccattttgtcgtatcgttgatattgattttcttaaagcgttccatcagctcttgaattttgtcatccgttttcaaaagcttgtcgttgtggcgcaccaccgttacgttagccgtcatccattctccgagctcacggtgaagcacgtaagcattttcatcgccgtccatcttcatgatatcggcccatttttcttcttcttttttcacataggaatcaaataatgaagaagacatgtcttccgctgatgtttcaagtcctgaaacatatttcaccgcattcggaccggcaaccattcctccgtagatggcggaaagcagagagttcgcccctaaacggtttcctccgtgcattgaataatcacattcacccgctgcgaacaatccgcggatgcttgtcatctgatcataatcaacccacaggccgcccattgagtagtgaacagcagggaaaattttcatcggaagcttgcgcgggtcatcccccatgaatttttcatagatttcgataatgccgccaagcttaacatcaagctctttcggatctttgtgcgaaagatcgagatacaccatgttttctccgttgatgccgagtttctgattcacgcatacgtcaaagatttcccgtgtcgcaatatcccgcggcacgaggtttccgtaagccggatatttttcctcaaggaagtaccaaggttttccgtctttatacgtccagactcttccgccctcaccgcgcgccgattcactcatcagacgcagtttatcgtctccgggaattgctgtcggatgaatttggataaattcgccgttagcgtagtaagctccctgctgataaacgattgatgcggcagatcccgtgttgatcatgctgtttgttgatttgccgaatacgattccgggtcctcccgtcgccataataacggcgtcagaacggaatgactcgatttgcatattggtcagattttgagctacgataccgcggcacgtgcgctcatcgtcaagaacggcgccgaggaattcccagccttcgtattttgtgacgagacccgccacttcatatctgcgcacctgctcgtccagagcgtaaagaagctgctgacccgtcgtcgctcccgcgtatgctgttctgtggtgctgtgtacccccgaaacggcggaagtccaagagcccttccggcgttctgttaaacataacccccatgcggtccaataagtggataatggacggcgctgcttcacacatcgcttttacaggaggctggtttgccaaaaagtcgcctccgtataccgtgtcatcaaaatgctcaaacggagagtctccttccccttttgtgttgacagctccgtttatcccgccctgcgcgcagaccgagtgagagcgtttgaccggaacgatggaaaacaatttaacggccgtgcctgattccgctgctttaattgtcgccatgaggccggcaagacccccgccgactacaataatgcttgattgactcatgatagcccctctccctctagtaatctagttctcttacacaaacgcaaaaattgcttttagaccgacgtatgaaagcgctaaaaatataatcagcgtcacgtaagtcgaaattctttgagaacgcggcgtgaccgtgatcccccatgtgaccgcaaaagaccataagccgtttgaaaagtgaaaaatgaccgataaaacgcctacaatgtaaaaaccgagcatgaacggcgagctcaaaatattcgccatcatatcaaagttgacttcagcgcccatctgtgcggcaatccgcgtctgccacacatgccagctgacgaaaataagggtgagaataccagtgacacgctgaagcacaaacatccagtttctgaaataactgtagtggccagcgttgtttttcgcagtaaatgctatgtacacaccgtaaaccgcatgataaattaaaggtaagaaaataataaaaatttctaacgcatacctgaacggcagactgtccataaagccggccgccttgttaaacgcatctgctccccttgcggcaaattggttgacgactaaatgctggatcaaaaagatgccgaccggaataacaccgagcaaggaatgcaatcttcgaaaataaaactctctgttcccagacattactttaccccctgtttgattcaagtgcgaaatgtgctaaaatctctgcccccacttcgtttcaattgtaagcactttattaaaatttattgacaatttcattttactcctccctcaaatgggcgtcaagaaaacgtgtacataaattataattttcggaattgattatttgacgggaaaattttattttcctgcgatatctttctcactttttttcacgtgttttataggatcatcctgtaatcctcccccctgtttaagctataataaacgaaggagagaggggaatacataatatgaagaataattatgaagcagctttagaacctttaactgaactcgacgtcagcgcatacggctacgaattaatccgggaaatcgtgcttccggatatcctgggcccggaacattcatccatgatgtattgggcgggaaaacgcctcgcccgcaaatttcctcttcaatcgtgggaagaaatccccgccttttttgaaaaagccggctggggaactttgacaaacaccggatcaaaaaagcaagagcttgaatttgaactggaaggaccgctcgtatccagcaggcttaaacatcagaaagagccgtgttttcagcttgaagccggttttatagccgaacagattcaattgatgaacgatcagattgcagaatcttatgaacaggtaaaaaagagagcggataaagtcgtcctgaccgtaaaatgggatatgaaggaccctgtataattgaaaaaaggcggtgactccgagtcccgcctttttgcctgcccgtttatacggcagacggctgtttagaaagctcaaacgcatcgtgaagcgcttcgaccgctttcaccatatcattttcgctgacaaccgttgatacttttatttcagatgtgctgaccatttttacttgtacatttttttccgccagtacggcaaacatgtccgcagcgacgccgggatttgagaccatgcctgacccgacaatggatactttcgccagctttctttcagtttcaattttttcatagtcaagcgcgtttttatattcttcaagcacagcgaccgtttgagcggcatcttccgttttcactgagaaagaaatgtccgcttccccatcgtccgcctgtgtctgaataatgatgtcaacgttgatgtttcgttttgccaaggcggtgaagatcgttgaaagtgttgtcagtccgcttgtcaggcctgtaacggacaccctcgtgatctggtcttcaaatgcaattcctctgacgattaaattctgctccattgatgattcctcctcaattaacgttcccgcttcatgttccgtacttgaccgtacttccaaaggcacttgatagtttttcgcaaactcaaccgcccgcgggtgaaggacacccgctccgagatttgcaagctccagcatttcatcataagaaatccccgccagttttctcgctgaccggacgtaccgcggatctgtcgtaaacacgccctgaacgtctgtgtaaatgtcacatttatccgctcctaatgctgcggcaagagcgaccgccgttgtatcggaaccgccccgtccgagcgtcgtgatgccgccgtcttccgtcacgccctgaaaaccggcgacgactgtaatccttccttcagcaagctgggcctgaattgccgtgatatcaatatccgtaattctcgcattgccgtggacggcttctgtgcggacacccgcctgccatcccgtataagagacggcgtcatatcctttttcctgaagcgccatggctaaaagcgaaatcgtgacctgctctcccgtagacagaagcatatccatttcacgtttacttggctcagatgtgatttccgccgccaggttaacgagcgcgtcggttgattttcccattgccgaaacgacgactacgacgtcatggcctttttgcttttcagcaatggctcgatttgcggcatgttgaattttttcggcagagccgacggaagtgcctccgaatttttgtacgataagacccatactagaccaccctttacattttggttcgtgcgggtgaggagaaaagagcgttttgttcacaataaaaaaagcaatgagaggaatagctctcattgctttttcatatcattacgattgattatgaacaacgagatagccctccaagaaaatgaattcttgacagccttacatttatttaatgcaaggccagcaaaacacaccgatgggatgtgattcacttcggcgacgctcccctttcagcttttctcgcagaatccatcattctcaaaaagcttactattgaagttcgcacctctatcttcaccttataacacgatcttatgaaattagttcacattctagcaggtttttcagaaaagcacaatactattttttcaatttttcaaacagcatctgagccgccgcagccggcacaccggcttttttaatatcgtcaaggcttgcttccttcatctttttgacagatccgaaatgctttaagagcatttttttgcgtttttcgccgattcccgggatatcatccaaaacggattgaaaggcgctttttccccggatctgcctgtgaaaactgatcgcaaagcggtgaacttcgtcctgaatgcgctgaagcaggtaaaattcctggctgttccgctccagaaacaccggttcaagcggatcgccgatcaaaaggttggatgttcggtgtttatcatccttcgccaatcccgctaccgggacatcaaggccgagctcattttcgagcacgtcgcgcgccgcattaatctgcccttttccgccgtcaatgatgattaaatccggcagcgggagattttcgcggagcaccctcgaatatcttcttctgacgacttccctcatagagccgtaatcgtcaggccctgttacggttttaattttatatttgcggtattcctttttattgggcttaccgtcaataaagacaatcatggccgatacagggtttgtgccttgaatattggagttgtcaaatgcttcaatccgatgcggcgtgtaaatgttcagcgcctcaccgagccgttcggcagcaccgattgaccgttcctcatcccgctcgattaatgagaatttttcccgcagagcgattttcgcatttttgtgcgcaagcaaaagcagctcttttttcgggccctttttcggctgatacacggcggtttccaaaagctcgctgatcatgtccctgtccacgctgtcaggcaccagaatttctttaggcagaaagtgattgtttttagaatagaactggccgatgtaggtcaggaattcctcatccgcttcctgatacatcggaaacatgctgacatcgcgttcaatcagctttccctggcgtatgaaaaagacctggacgcacatccagcctttatcgtaggcataagcaaacacatcgcggtccaaaaggtcattcatggtcattttctgcttctccatcgtcgattcgatgtgagcaagctgatcgcggaattctttagcccgttcaaattcaagcttttccgccgcctctgtcattttctcttcaagctcttttttgacctcgttatgccctccctttaaaaaacgggtgatatcttcaaccagctcgcggtttgtctcctcagaaatatctttaacacaaggagcgaggcattgtccgagatgataataaagacagacgcggtccggaagcttcgagcacttcctgagcgggtataggcggtccagcagttttttcgtttcccgcgccgcctgcacattcgggtacgggccgaaatagcgccctttgtcttttttgacattccgggtgacaataagccgcggatggcgttcatgggtgattttaataaagggataggttttatcatctttcagcatgacattgtatttcggatcgtattttttaatcagattcatttccaaaataagcgcttcaagattggaggaagtcacgatatattcaaagtcctcaatctccgtcacaagcctttgggtttttgcgtcgtgagaaccggtgaaataggatcgcaccctgtttttcagcaccttcgctttccccacgtagatgactgttttttgacggtctttcattaaataacagcctggctgatcgggaaggagggccagcttttctttcagttgtttattcatacgttacccttccttatattcatttctcgtgtccattcagtgtatcacgaacatttgtttttctccattctcagcttttggcagatcaaaaaaaggcgattcctctttaaaaaggaatcgccctgccgtaacggccgctttcggcttacagatgtttgtttacaagctcttcaagcgcttctttcggtttgaagccgacagatgtttcaacgacttctccgtcttttaacacaagaagtgtcgggatgctcattacgccgtatttaccggcagtttcttggttttcatcaacgtcgattttgacgattttcagtttgtctcccatttcttgatcaagctcttcaagaacgggcgcgatcattttacaaggtccgcaccaaggagcccagaaatccgccaatacgaccccttcacttgtttcagctgagaacgattgatcagttgcttttacgatagccatttgttattcctccaatgtcaaatgatgatttttagtatagcatctcccattcgttcatgctaatttaatgcttatattattttctcccgaactcctctgaattaatcttctttatatggtgtattattaccgatcagcaggcattcaaaacttaagatggatcagcaggcagcgtaattaaaactaccgccatcggaggaagctccgcctcaaggttttcgcccttttgagtaaatccggaaaacggcttcggtttgacgttttccgggctgctgaatgtattgcgggcattcattttttccgcatgcagaatcgttcccgaaggcttccctgcctttttcatgccccgcaattcaatcttcacgtcagctttgtgcagatgatcgatattgcaaatgctgatatgtatgtcgccgttttgctgtttggacgctgaaatgctgacctgcgggagccggccgtctttccattcgtaccctgcggcttttgtttctgatgccaaaagagaagcgtcctgatgaaccttaaacatatcaaacacatgatatgtcggcgtcaacagcatctgtttcccttctgtcaggatcattgcctgaagcacgttgacggtttgcgcgatattggccatttgtacgcggtctgcgtgctgatgaaaaatgtgaaaatgcgtggcggcgacaagcgcgtcgcggatcgtattctgctgatacagaaagcccggattcgtgccgggctcaggatcaagccatgtgccccattcatcaatgatcagaccgactcttttttccggatcatactgatccatgatggcgctgtgccttgtgatcaattcatccatatgcgccgcttttttcatcgtgatgaaccattcatcttccgtaaactccgtcgctgatccttttcccttccagaagtcgcccggtattgtgtaataatggaggctcagcccatccataagatctgcggcttttttcattaaggtttcggtccagcggtaatcgtcgacattcgcgccgccggcaattttatagatttcattaccgctgtaattgcggacataggtttgaaaatttctgtaaaggtcggcataatactcaggatgcatgtttccgccgcagccccagttctcatttcctattccgaaatatttcagcttccatggtttttcccgcccgttttcctttctccagtcggacatcggcgtgcctgcttcaaatgtcatgtattcaatccaatcagccatttccttaaccgttccgctgccgacgtttccggcgatgtacggttcgcagccgagcagttcacaaagcatcataaattcgtgcgtgccgaattcattggaatcaatcgtcccgccccaatgggtattcagcattgttttgcgtttccctacgccgtttgcccaatgatattcatcagcaaaacagccgccgggccatctgagaacgggaatctgaagctttttgagagcggatgcgacatccgtcctgatcccgtcggtattcgggatatcggaatcttttccgacccagatgccctcatatatacctcttcctaagtgttccgcgaaatgtccgtatatatttttgttaatggttgccctagtgatatcggtttgaataactgccgtattgtgagacaaacttgatcattcctttcccataataagaatgaaagcactacagtcaatctttgtatctgggatgtatgctgaaaggataagtttgtaagcgctttacagaaagcttattacattggttcggacatgtcaatctattattttatcaatgtataatttgtacgaactaattaccccaaatcaaaaccctctgacaaaagagccagagggttttgattatgaatgaatattggcatttttgaattcctgggtcagaagcggaaccacttcgaacaaatcgccgacaatcccgtagtccgctattttgaatatttccgcttccgggtctttgttaatggcaacgatgactttactgtttgacattcccgccaagtgctgaatcgctccggaaattccgcaggcaatatacaaatccggcgtgacaacttttcccgtctggccgatctgaagagaatagtcacaatagtccgcgtcgcaagcgccgcgcgaagcgcccaccgctgctcccagcacttcggcaagttcttttaacggttcaaacccgtctttgcttttgacgccgcggccgcccgcaacgataattttcgcttctgacagatccacgccgtccgctgtttttttgactacttcttcaatgaccgtccgcaaatctgccgccggcgccgcaagctcttcaatatcacccgtgcggctcgcgtctttttctaatgcctgaatgttattcggacggattgtcgccaagatgaaaggatcggttgaaatcacctgttcaaaggctttgccggaatagatcggtcttgtaaaaacgatgttgtccccggtaacgcttacatccgtgctgtctgaaatcaatcccgtttcaaatcgggccgcaagcttcggtgacaaatcttttcccatagaagtgtggccgaaaatgaccgcatcaggcttttcattttcgatcagatccccgagaaccgcggcatatccgtctgctgtatactgagaaagccccggtgtatcagccgtaaatactttgtcggcgccgtagtgaatgagttctggtgctgcatcagccgcgccttttcccatcagcacgccgattacatctcctccgccggaaatggttttgcctgcggctatagcttcaaaggtgacgttccgtaaggcgccgtcacgaatttctccgagtacgatcactttttttcccattctgacatcccccagtttctttaatatcagtttatacgactttggcttcttttctcagcaatgacacaagctctttcgcctgctcggcggcttctccttcgatcagtttgcccgcttctttttgcggcggcagaaaacgttcgatcgttttgagcttcggagcagcatcgtcctcatcaatgtcaaggtcatcgagctcaagttcttccagcggttttttcttcgccttcataatgcccggaagcgacggataacgcggctcgtttaatccttgctgtgccgtgatgactaaaggaagagaagttttaatgatttcggtatccccttcattgtctttctctgcaacagcttcatcgccgctgattgtcaattttgtaatcgttgtgatgcaaggaatgtttaacagttcggcaagtcttggcgccacttggccggagccgccgtcgatcgccacatttccgccgagaatcagatcatattcctgatctttgaaatagtgatataagatcgttgaaatggaatattggtcaggatcgctcaagtcatcttcaatattgattaacaccgcctggtcgcagcccatcgcaagagctgtgcgcagttctttctccgcatcctctccgccgaccgttacggcggtaacggttccgccgtgctcttctttcagctgaatggcttcttcaatggcgtattcatcatacggattaatgataaattcggctccgtcctcctgaatctttcctgcttcaatgacgattttctcttctgtgtcaaacgtccgtttcatcagtacaaatagattcatattcttatcccctttatcttcgcccaccgaattgaggctttcttttttcgagaaatgcctgaatgccttcttttgcgtcatctgatgcaaatgcttccccaaagcgctttgcttcaagctttaagccgccgtcataagaataaaccttgtttgtataaaggagctcaagcagaaaagccatcgactgcgggcttttttccgcaaacttgcccgccagcgttttcgccttttgcagcagctcttcctcatttgcggcgcctatggtgacaagcccgaggctgagcgcttcttctccggtcacaggttctgaagtgccgatcatttcaagcgctttcgccgtgccgacgtaccggggcagacgctgcgtcccggcaaagcccggaataatgccgagattcagctcgggcaggccgagctttgcatccaatgtagcgattctgatatgacaggccatggcaagctccagaccgccgccgagcgcagcgccgtgaatcgccgcgataacaggctttggaaacccttcaattttttccatcagctgctggcctttatccgccatggcagaagactgctcaaggttttcaagcgacgtaaattcctttatatcggcgcccgccgagaaaaatttcccctcaccgcgaatgatgatgcttctgacgctgtcatctgtttcataccggtcgaacagaccggacaactcgtctaaaatcgcaccggacagcgcgttggccggctgatgatcaatggtgatcaccgcgacagattgttctaccgccactgaaaggctgttcatccgtcaaccccctttagttttgatgaatccctgacaccaacagttccaataccttgtctgacaaatccggaagatcatatttctgatcgttcatcacccatgttgtcactgtttcatctatcgtcccgaatatcatctgccgggcgaggcggacgtcgagattgtctttccattcgcccgactcaattccttcggtcaaaatggtgtccagcatgtttaaataaccttttaaaatgtcattgattttcaggcgcagcttgatattcgactgtctgagctcaagctgggtcacaatcgcgaggtggcggtcattgccgagcagtgtgaaatgctgcttaatgacgagagcaagtttttcttttgccgtcgttttttctttcacttcttcttccatgcgttcaatgaactggcccatcttttctttaaaaagagaaatgagtatatcctctttgtttttgaaatataaatagatggtgccgtccgcaacgccggcctgcttggcgattttggacacctgtgattggtgatagccgttttccgctatgacttctactgctgcatcaatgatctgcatatactttggccgtttttggttcaatgtcatcgttccttccttcaataaatgaatgactattcattcataacttcatgataaaaaggaatccgggttttgtcaagtttttcttttaaggcactttgttttcacgggaagaatctgcctcttcgactaagcgtcttcttaatatttttccgacggccgttttcggaagctcttttctgaattcgtaaagcttcggtactttgtacggcgcaagccgctctcttgcaaacgcatcaagctcatcggcatttgcctcggcccctttttttaagacgataaatgctttcaccgtttcccctctgtaggagtccggcacgcccgctacgacgatttcttgaacggcttcgtgctcatacagcgcctcttccacctctcgcgggtaaatgttgtatccgccggcaatgatgatgtcttttttcctgtcggcgatgtagaaaaacccttcctcgtccatgtaacccatatcaccggtaaacagccagccgtctctgatgacacgcgccgtctcctcttgtttgttccaatagcctttcataacctgcgggccttttacgatcagctcgccgtgttcatacggctccgcaagcccgcctttttcttctgaatatattccggcatctgtattgggccaaggacagccgatgctgccgggtttattttttccccaaatgaagtttgaatgggtaaccggtgaggcttcagataatccgtagccttccacaagctttccgccggtcactttttcaaatttctgtttgacttcgaccggcagagccgctgaaccgctcggacagcttttgatggacgagagatcatatttgttcagttcaggatgatgcaaaatgccgatgtaaatcgtcggcgcccccggaaaaaccgtcggcttcagcctgtcgattgtttttagggtgtccaaggggttaaatttaggaagaaggatcatttcacacccctgcatgatggaaaaattgagcacggcggttaatccgtacacatgaaaaaaaggtacgatgccgagcaccttttcggctccctttttcattttgtacatccaggcggcgcacatttctgtattggcctgaatgtttcggtgcgtgagcatgacgcctttcggatagccggttgttccgcccgtgtattgaagcacggcaatgtcatgtgcagggtcaatatccgatagctccgcttcctccgctttttcttcttttaagatgtccgctaagctgtgaatctgttcgtggccgtcataatcaatatgcacctgttgtttttgcgtgagcgtataaagcatatttttcggaaacggcaaaaagtctttgatactggttgtaataatgcgctcgacgattgacaacgttttcatttttatcaccttcggaaagagcatatcgagggtgatgatcacacgcggcgcactgtctttcagctgatattcaagctcgtgttccgtgtagagaggattggtttgaacaacaatgccgccggcaaacaatacaccgtaaaaagcgatgaccgactgcggacaattgggcagcataatggcggctctgtcaccttttttcagacctgttttgcgtaaaaaagcggcaagctttaatgaatctgtgagaacgtcttggaatgtgagtttttttccgagaaaataaatggcggtatggtttgggaattgagctgcggagtttgtcagattggatggcagggtttgatcggtaaattcaagctcatgcggaatctcttcgggatattgagaaagccatggcttttcagactgcataaaacctctcccttctgtttttcctatacgctattattatagcagaaggctgattggaattggaaagcgtttcatgtgaattttgacgttcaggaggtgttgtcctttgctggaaacgatgcattttgaagagggagggagttcctattctgcgccagctgccgaagccttttacttcagccgcttttttgctacatccctttgtccgaatgccggatgggtgggaagagcaaaagcgcgagcggccttttgaacatatttatccgagtgatgaggagatcatcacaatgggcagacccgtttcctggaataccgtcatgaccatttgcggactgcgctctgaaaaagagaccgcgcttgcgcttatgaccgctgtcatggcgctgcgggatgaatatgcacagcctgaatccgccgagctgcttaatcggcttcatcctgcggatctgtacttgccgagcgatgatgtcacttcgccatttttgattccggggctcttagacgtgttccgttcaaaaggcattgagcgctgcatttattatgagccggtcgaagagaaaggtatattttcgctcaatcaaacggcgcctttggatgtatgcggactgctgaaggctgacatgatcattgccgataaaaagcgccgcgccgcttttatgagtatgtatgattctttcgcgacactctttctcatggaagatcaagacatgccgtctgtgatccgcgccatgaattgggaagcggtcatttgctctgatacgacctgcataaactggttttctcaataaaaaaaggccaccggatttagttcggcagcctttttttcagtattaagatgtcatgaccagataaataagtccgatgaacagaaaaattcccgctgccgacagcagcactttcgcaagcttctccatttttccccgtccccttaaatcccggcggccaccacaaatgacaggccgactgagatgacaaatgaaataaagccgacagctctgttatctttttcaatttctttatcaattttaaaccggggcgtcagaaattcaaagataaaatagctgattaaaagcataataaatccgtatacgccccagccgatcatttgcagcagcgaattatgctgggcgatgctgtgctgaaagacatttgcgatcccgagaattttccctccggtcgccattgcaaccgcaagattgcctttttggatttccacccagtttttataggatgtcaccaattcaaacacggtcagaaaaatgacaagacacagaacggctacactgtaataagccgcgatttcaacaagctcattttcccaaaaagcattcatgacgtttactccctttttattttagttcgacaatcgttacgcctgatcctccttctcccgcttccccgaaccgcgagcttttcacgctgcggtggtttttcagaagatcctgcaccccttttcggagggcgcctgtgccttttccgtgaatgatggacactctcggatagccggcaagcaccgcgtcatctaaatatttttcgacgcggctgagggcattttcgtaacgctctccccgcaggtcaagttcaagggacacgtgataatccttcccttttacggcggtgatggctttttcttttttcggttcaggagcggacttgagaaactcaaggtctttttccttcaccttcattttaaggatgccgatttggacattccattctttctcgccggttttttcaagcagcgcccctttttgtccgaatgtgagcacctttacttcgtcacccggcttcagctcgcgttttttctctgtttttctttccggctgctttgatttttcaaaagccggcatcgcgtctccgagacgttttttggcatcaatcagctcgtgttccttaaaggatctgtgttcttgcttgatagaccggagctcgcgaatgatctgttctgcttcttttgcggcgtcttccagtttttccgctgctttttgttcggcttcttccatcagtttgtctttctgggcgttcagctcaatgatttgctgctgcagctctttatgcagtttttctgcttcttttctgattgattcggtttcagaaagctcttcatccgctctttttttactttgttcaagtgacgcgatcatcagatcgacttcattgtgttcggcggtcatttctgacttcgcctggccgatgatatgctccggcaggccgaggcgtcttgagatttcaaaagcgttgcttcggcccggcactccgatcaggagcttgtaggtcggcgaaagcgtttcaatatcaaattcaacgcttgcattcatgacgccttgtctgttatatccgtatgctttcagctccggataatgggttgtcgcaagcactctggcgtttgtccggtggacttcgtcaagaatgctcatggcaagcgccgccccttcctgcgggtcggttccggcaccgagttcatcaaacagcacaagactgttttcggacacgtcttttaaaatactgacgatattgaccatgtgagatgagaacgtactcaggctttgttcgatcgactgttcatcaccgatatcggcaaaaacatgatcaaatacggcggcttccgatccttcatcagccggtatgtgcagtcctgcctgcgccattatcgtcagcagcccgagcgtttttaacgtaacggttttaccgcccgtattcggacccgtgataacgatcgtcgtataatctccgcccagttcaatgtcgttggccacgacttgatcttgaggcagcagcggatggcgcgcttttttcagacggataaagccgtctccgttcataaacggttttgtcgccttcatcgcttttgcgtatctcgcttttgcgaaaatgaaatccagcgtctgcagcacttccacattttgaacaatctcttgtgtgtgttcagccgtatgctccgtcagcatccggagaatccgttcgatttcctgtttttctttcaccttcgcctgctgaagcgagttgttcatatcgacgatcgcctgcggttcaataaacagcgtcgcacctgatgaagaagtatcatgcacgatcccgccgtagcttgatctgtattcctgtttgaccggaatgacaaagcggtcattccgaatcgtaacgatcgtgtcagacagcatttttgaagcggaagatgaacgcagcatcgattcaagccggtctctcactcttgattcaagcgttctgagctgcgtgcggattcctcttaaagcgggagatgcatgatcaagcacttcgccgtgatcatcaatgcaggaattaatctccctttccaaatcgcccaatgtaatcagctcttctgcatgggcctggatcagcggaatgctgacgccgtcttctgtcatttgactgataaagtgcttcatttgcttaacggcatacagcagcccggacaattcggtgaattccgccggggtcagcacgctgccgatttccgcccgacgcaaagccgatcttatatcggtcagaccgccgaacggagcatggcctcttaagcgcatgatcgcggatgcttcttcgacttcatccagctgtttttggatgtcggcgagatcagtcaaaggcttcagctgcagaagcttttcccggccgagcgatgaggcggcatgtgcggtaatctgttcttttactttatgaaattcaagtgatgataacactttttgctgcacggttttgtggtcctccttacttaatcattgcgcgtcagaaatgctttgacctcatgtagcggccgggcgtttaaaacattctttgtttctgtccagcctttgcgcgcagcggtcacgcccgttttcatgtcatcgagcatctctatattatgggcatccgtattaatgaccaaagtcacgcctttttcgtttgctttgatcagatgctcagtccgtaaatcgaggcgcgcggggtttgcattcagttcaagcgccgtatttgttttggcggcgagttcaatcagcatgtcgatgtcgacttcatagccggcccgtcttccgatcagccgtcccgtcgggtgggcgataatatccacgtgcttattcgtcagcgcctgttcaagccgtttcataatgacatgttccggctggctgaagcttgaatgaatagacgcgatgacaagatccatttcagacaggacactgtcatcataatcaagtgagccgtcggggagaatgtccatttccacgcctttaaagatatggaagttttcaaactcggcgttcaacgcgtcaatttcttccgcttgttttctgagccgttcggccgttaacccattggccacctttaaatattgggaatgatcggtgatcgccatgtactgataaccttttgccatacacgcttctgccatttccctgatagaaaaagcgccgtcactccaagctgagtgcatatggagatcgccttttatctctttttgctccacaaggtccgtttcttcccgatacgtgtcgacctcctgcccgctttctctgagctccggaggaataaacggcagaccgaagtgggcgtaaaaggcttcttcgctcgggaaagttttgacttctcccgtttctatcgtttcaaccccgtattcgctgatccgttcaccgcgctcttttgccagctggcgcattctaatgttgtgatctttggagcccgtaaaatgatgcagtgtggtcgcaaactgctcctctgtcacaagccggaaatccacactcgtctcatattcaaaggtcaggatgactgatacctttgtatccccgctcgctatcacgtcttttacgttcggcagggacagaagctggtctctgacagccgccgggtgatctgtggcgataatgtaatccagatcttttacggtttcccgcgctcttctgagactgccggcacgggaatatttctgaatatccgtcagcccggccaaatgttcttcaatcactgaagcaatgctgagcgcatagccgatcggaaaacgttcaggctgttttccggcttctccgagagcctggaggattttctcctctgtttttttgccgaaaccggcgaggccctgtactttttgctgctcgcatgcttctttcagcgattccgcgtcatgaacgcccagctcttgatacagcttggcgattttcttgccgccgaggcccggaagcttcaacaaaggaaccaagccttcagggacttctttctgcaattggagaagcgtgccggacacgccttcctgcatatattcacgaatgacgctataagtgccttttccgatgccggataaagacatcatgtcgtcgatttccgacaggctgcggtcatcctgctcaagcgccgctgccgcttttcggaaggctgatattttaaacgggttgtcccctttcagttccatatagaccgcaatcgtttcaagcagcctgataatatcttttttatgcatactgttaacccccagtcgtttcctgcttttcatcatacaaatttttctcctcctgcacaactgacgcagagcttgaaaaaaacttctccggtcaagagaagttttttatgccccgtactgggcccacagttcttgcagaagccctgacagatacggcgtatgatgtgtgatgatatccgcaagcgttgattgtgcgagcatatcttgaagcgcgcttacaggcagtacggatgcgacgtataacaggataaacgcaaatagatagacttccagaaacccgagcaccccgccaagcagtttgttgatctgtttaatgaccggaatgctggcgatgatattaagggccgctccgataatccggagcagaatctttgcgatgataaacaaaatgacaaacgcgatcgcattgtaataagccgtctctacgtttccattaataaaagaaagagccgcctggccgccggaaaaatcaggcgcaggtataaagctcaaatgcggcgcaaggtttttgtaaaaaagcgccgcaaacgcaatcgaaaggataaaactcgttaaatatataaattggaggataaatcctctcttcaatccaagcaatgtgcccatcaagagcaaaactaagatgatgatatctatcatatggtgttcattccttttctttaagctgccgctccagtatttcatatttttcttgcagtttcatataatcatgcacgacattgaccgcagtcaaaacagcgagcttatttatatcaagatatggatttttctcgttgatttctctcattttatcatcaaccattccggccacatgacgcatgtgcgctttgctttcttccccgataatggtgaagtgctggccgtaaatgttaactgtcgttttggtttttttgccgtcagacaacgtttctcctccattccgcgagaatcctagttcctatcataccacgattatcgtttgaatggaaagacgagcctcgggctgttatgatacactggtatatacagtgaaaagtgccaaaaaaggagattatatcgtgtcccattctgttataaaagtatccgcttccgctatagaacaaatgaaacattcctatgccggctcccttacttccgccgttccgcagggcgccgtcttccaggctaagcctccgggctgtaccattacagcctaccgttcgggcaaggttctctttcaaggaagaaacgccggcacagaagcggcccgctggggaacggctgaggcgccgaaggcaaagaaaaccgtcaaaaaagcggccgatccgatctacgctcccccggcgggcattgcgtccatgtcggtgatcggctcagatgaggtcggaacaggcgattatttcgggccgataacggttgcctgcgcctacgccgacaaaacaaagctttctttaatgaaagaactgggcgtcaaggattcgaaggatttaaaagatccgcagattattgaaatcgccaaactgttaattaaaaccattccctacagcctgcttgtgttaaaaaacgaaaaatacaatcagatgcaggaaaaaggcatgagtcaaggaaaaatgaaggcgctccttcataatcaggcgatttccaacctgctgaaaaaaatgaacggcgtcaaaccggaagcgattctgattgaccaattcgcagagcctggcatttattttaagcatctttccgggcgggatatcgtaaaagaaaaaacgtttttcagcacgaaggcggaaagcatacacctttccgtcgccgcagcctctatcatcgcgcgatattctttcttacttgaaatggataagctttcccgtgaagccgggatgacgatccccaaaggcgcggggccgcacgtcgatgaagctgccgccaagctgatcatcaataagggagaagatgcgctcagaacattcaccaaacttcattttgccaatacgcaaaaggcgaagcgtcttgtcgaacggaagcggtcataataaaaaaaagcttgcagagtgatctgcaagcttttttctttagcctcttaatacggcctgatacgtttcttccaacgccttcagcacgttttcatggacttttgtcacttcttcttctgtcaatgtttgttcaggattaacatattgaagcgagaaggcgacggattttttgccctcttccatatgctcgccttcgtacacatcgaagacggtgacttctttcaacagcgcgccgccggcatctttgataacggcttcgagctgtccgcttgtaacggttttatctgcaacaagcgcgatgtcacgcgtgacggacgggtatttcggaatcgccgtgtacacgagaggttctgtttcttcggtcagaagcgcgtgcagatcaagctcgaacacatacgtttctttgatatccagctctttttccattgccgggtgcacctgtccgataaatccggcaagtgagccgttcaaaagaatgtttgcggtccggccgggatgcatgtttttgcgttctgactggacaaattcaatccggtctgacacattcaattgatgcagcaggccttcaacgatacctttgacaacgaagaaatcaaccggctttttctcaccctgccataagtttttgcgccataatccggttacagctccggcaacccgttctttttcaacaggttttgtattttcttccttcgtcagaaatacagaacccgtttcgtataaagcaacggaatcagtctgtctggccaggttgtatgaaacagcttcaagcagattcggcacgaggctgtgtctgagaatgcttctttcttcgctcatcggcagagccagcatcgtgttgaatgatttttcgatcgcaaaagcggccgcttttttatcattagtcaatgaataagtggtcgcttgagaaagacccgctccttcaaggaaacgtctcactttccggcgttttgcctgatacggggtcaagccgcctgtcgtgccggccgtttccggaagcgtggacggaatattgtcatacccgtataatcttgccgcttcttcaatcaggtcttcttcgattttaatatctccgcggcgtgacggcaccgttacaacgagaacgtcttcagcttcaccgactgcaaaaccgagccgcttgtaaatgctgatgatttcttccttagcgattgtcatgccgagcacggcgttcactttttcaactgacacgtgaatgttgttcgcttcgattttcagatggttttcttcaaccgtgcctgacagcacttctccgcctgcatacgcctgaatgaggctgcaggcccgttcagctgcaagcagaacgcgtgccgggtcaatgcctttttcatatctggcgctcgcttcgcttctcagcccgaggtctctcgacgctttgcggacggtctgtccgtcgaaataagcggcttccagtaaaatcgaggtggtgtcttcacggacttcagactcggctccgcccataactcccgcgactgcttgcgccttttttccgtttgtgatgaccaaatggctgcttgacagcttgcgctcctgttcatcgagcgtcacgatggtttcgttttccgccgcttttctgacaacgacctcttttgaaccgaaccggtcgtaatcgaaagcgtgaagcggctggccgtattcaagcaggacgaagtttgtaatgtccacgacgttattatgcgggcggatgcctgcattcatcagcttcgtctgcatccaaagcggtgacgggccgattttgacgtttttaatgattttcgcggcgtaatgcgggttggcctgcgtatcttcaatcttgacggaaacagcgtccgccgctttttctgccgctgtttcatatgaagtctccggaagctttacctctgcgccaaggatagccgcgacttcataagctacgccaagcatgttcatcgcgtcggcgcggttcggcgttaagcccaattctaaaatcgcatcgtcaagctgaagggccgccattgcgtcagctcccgtttcagcatcattcggaaacacgaaaatgccttccgcatattctttcgccacgagcttgctttcaatgccgagctcctgaagggaacagatcatgccgtgagatgcctcgccgcgaagcttggcttttttaattttgaaattgccgggaagcacggctccgaccgttgcaacggcaaccttctgtcctttatcaacattcggggcgccgcagataatctgcacgggttcctccgcaccgatatcgacaaggcatttgttgagtttgtcggcattcgggtgctgttcacgttcaagcacgtgtccgatgacaacgccttttacgccttcccctttatactcgataccttcaacttcaataccggctcttgtaattttttctgcaagcacggccgggtcgattccctgcaagtcaacgtaatcttctaaccatttataagaaacaaacatgtgtatcctcctcttacgcctgtttaaactgcgaaatgaatctgacatcattggtatagaaatggcggatatcttcaatgccgtatttcagcatcgcgatacgttcaacacccattccgaaagcaaaaccctggtactcttcaggattgaacccggccattttcagcacgttcgggtgaaccatgccggcgccgagaatttcgatccagcctgtttttttgcagacggagcagccttgtccgccgcacttaaagcaggtcacatccacttcgacagaaggctctgtgaatgggaagaagctcggacggagcctgatttcacggtcttggccgaacatttttttcgcgaccaattcaagcgtgcctttcaggtcgctcatgctgattttgcggtccacgacgagaccctcgatctgcatgaactgatgggaatgtgtcgcgtcatcgttgtcacggcgatacactttaccgggacaaatgattttgacggggccttttcctttatgtttttccatcgtgcgtgtctgcaccggtgacgtctgcgttctcatcagcatttcttctgtaatgtaaaagctgtcctgcatgtcgcgggccggatgttccttcggcagattcagcgcttcgaagttataataatccgtttccacttcagggccttcttctacggtatatcccataccgataaataaatcttcaatttcttcaataacgaccgtcagcggatggcgtccgccgatgtttaccggactgccaggcaatgtgacatcaatcgtctgactgctgagttttttattcatctcttcttgttcaagctgttcatttttcgccgttatggctgctgcaatgcgctctctcacttcattggcgagggctcccattttcgggcgctcttcggcggacagtttgcccatgccgcggagaacttctgtaatcggccctttttttccgagatattgcacccgaatatcgttaacttcttttaatgaaccagccgcttctactttttctgcagcttccagttcgagctgtttaagcttctcttccatcatgcatcctccttttatgtaaaccaaaccgttctatgcctttttcagaaaacaaaaaaacccgccccttagagaagggacgagttgtggccgcggtaccaccctttttaaggcagacttcatctgccgaaagcttcattgacataacggaaacgatcgttccggttcacctttacgcgcgtttggcgcggtcccggtgacaactcgagaggtgaaaatcaatttctgtgctgcgataaaaatgctttcagtcagcggcattttctccctggaaggcagtgtgtgcaaaaattgacgtcctctgtcacggtttttacattattgctatctattatagtgaaattcgcggctttgcgcaacctatcctctaagatgatatacgaggattgcggccgctaccgccacattcagcgattccgcctgtccgtacaacggaacatacaggttgagatctgttttttgcagaaggccggcgtccactcccgctccctcgttcccgacgattaacgcgaacgattcttcaggcttcacgctttgataaaccgcaccgttttcaagcgccgtgccgtagatcgcgacaccttgtgatttcagctcatcgataaactcatcaagcggacgtttcaaaatgggaatatgaaagtgagatccttgggcagaacgcagcgtttttccgctgtatggatctgccgtcccgtcaccaaggacaacggcgtcgatacccgccgcatccgccgttctgatcattgttcctaaattccccgggtcctgcacggcatcaatcagaaggagccgcttcagcggatcaggcttctcttccggcatatggcagactgcggcgatccgctgcggcgtttccgtttccgtcacggctgaaaacgcgtcttcgctcagcacataacaaggaatgctcatgtccagatcggctgggatggcgctctcatcttttacgagaatttcttttaccgttccctttgatttgagcgcttcttctgccagatgctctccttctatcagaaatgtattcgttttaagtctctctttttttgtgtgaagttttttccagtccttcactttttggttttttgcagagtcgattcgtttcactttatttctgtgctctccttttttcatgcatgttgttattatatctcaagaacagcacataataaaccgcgtgcgcggtaagaatatgcgtatcacaatcaggaaaaaggagcggttgtaatggatcttaatttacgcaacgccgttattgccaatgtaaccggcaataaccaagaccagctggagcacactatcgttgacgccatccaaagcggtgaagaaaaaatgcttccgggcctcggcgtattattcgaagttctttggcagcatgcgtcagaatcagaaaaaaatgaaatgctcaaaacacttgaaggcggattaaagcctgcgcaataagcatgaaccgggtgatggcacacccggtttttttgtataataacggcgagggggatcgccatgcagttacagccggaactggcaaagaaattgattgccgaagtcaaacacatgtacagccgcgaagtgattattgccgatacaaaaggaatgatcatcgccggcaccaacgaagcgcgcgccggatgttttcatgaaggcgcactgatctgcgcgcgcgaaaaacggaatgtcatcatcacgaaagaagatgaaaaacggctcgagggcgtaaaagcaggactgaacctccccgttttttcgggtcatgaggtgatcggagtattcggtctgacaggaaaccctgacgatatcctgcctttcggagaattgctcagaaaaatgacagagctgtttattaaagaaacgcgccacatggaagaagcgcagtggcgtgcgagaatgcttgaatcttttatggttgattggctgcagttaaaagaatggtccccgggctttatagaaaaagcaaagctcctcggcgcagatctgcattcacaccgccggatcatactcattcaagaccgttataagcaatataaagcagaagagctcaggcgaatctggcagaacgaatgccctgaagacctgtttgtccgctggggaaatgaacgcattctcattaatcatgaaacaaattcaagttccaaacagcagctgatcaaaagaatcggcgctgtttttgggcagcctgtcacggccggcatcggtcggattgttccgggagagcgcctcacggaatcatacggacaggcggagaaagctctttcggcaggcattgctgacaagcaggccgtctttgaagaagatttaaaactggatatgtgtcttgccgaaattgcgcccggcacacggtcggaattttcacgccgtgttctcaagcatgtgctcggccgtgaagaacttctggatacgctgcgcgcctttttcaaccggcaattatcgttaaagcgcaccgctagcgacatgcacattcatattaatacattgcgctaccgtctttccaaactggaatcattgacaaatatgaagcttgaccgccctgaagacattacggctttttatttggcgcttcgctttttagaccaacatacaaaaaacacgtaatctcatcgtcatttttcatatgtttctccatagtgcgcggaatcatttttctttacaattaaatgaaaacgcttttctaatcagggaggttgggagaatatgatttcacgagaggcaaaggaacagttcattctggcggtcggagaggagaattatgatgattcggcggcggggcgtcttgtgtattcgtacgatgcggcccctcagctgcaggccatgccggatgcggtaatagccccccgctgcgcggatgacgtatcacgtatactaacgatttgcagcaggtatgacattccgatcgtgccgaggggttcaggcacaaacttatgcggcggcacatgtccgtctgaaggcggtcttgttcttttattcaaacatatgaaccgcattctcgaaattgatgaagaaaatttgacggcaaccgtacagcctggtgtgattacgcaagatatgatccatgcggtggaacgaaaaggtttattttatccgcctgatccgagcagcatgaaaatatcgaccatcggcgggaatattaatgaaaattccggcgggctgcgcggactgaagtacggcgtcacccgggattatgtgctcggccttgaagcggtcctggcatcaggcgatatcatccgcacaggcggaaagctgacaaaggatgttgcaggttatgatctgacaaggctttttgtcggatctgagggaacgctcggcattgtgaccgaagcgactttaaagcttgttccgaagccggaaacgaaaaaaacgctgctcgcactctatgaacatattgaagcggctgcggaatctgtttctgccattattgctgaaaaaatcattccagcgacactcgaatttctggatcagccgacactgcaggtcattgaagattacgtcaagatcgggcttccgaccgacgcaaaagccgtcctgctgatcgaacaggacggtgacagcgatacggtcagacgcgatatggaaaaaatcgaagccatctgtaaaaacggagccgccgcatcggtccaaacggctgaaaccgaggaggaggcattcgcccttacagaggccagaagatccgcattatcagctcttgccagactgaaaccgacaacaattctggaagatgcgaccgtgcccaggtcacaaattgccagcatggtcagagccattaacgagattgcagaaacatacggcttgtccatctgtactttcggccatgcaggcgacggcaaccttcatccgacgtgcaccaccgatatcagaaataaagaggaaatggaacgtgtcgaaaaagcctttgccgccatttttgagaaagcgattgagctgggcggaacgataacgggtgaacacggggtcggcatcgtgaaagcgccgtatttagaaatgaagctgaaaacagaaggcatcaccgcaatgaaagccatcaaacaagcgctcgatccccaaaacctgctgaatccgggcaaaatattcgccaattcatcaaggaaacgcgtggtggtgatgaaatgacaacagctaaagaacagaagcaaattcaaaaagaattcaaaagccggatggatgaaggtgaattgctgaactgtatgcgctgcggcttctgtcttccttcctgtccgacctatatagaatcgggatttcaagaatcccattcgccgcgcggccggatcgccctgatgaaagccgtcacagacggactgatcgagccggatgaagatgtcgagcgctcactttcgctgtgtctcggatgccgggcatgcgaacccgtttgtcccgcaggggttaattacggacagctgcttgaagaagcaagggatatcattcatcaaaataaaaaacataagccgggcgtacgccttttgcggaaagccgcctttaccgggcttttccctcatcaaaaccgcatgcagacagcggcaaaccttctcgggatatatcaaaggtcgggattgcaggccgccgtcagaaaaaccggtatgctgtgcgttttgcctgagcatctgcgcacaatggaacaagtgcttccgcccgtcccgaaacggaaagacatgaaggaacggccgcgttttcttcctgccgcgggctccgttaaaaaacgggccgcttttttctcgggctgcttaatggatacgatgtttttagcgacaaatcatgcgacaactgcgctgttacaggcggccggatgtgaaatcgcggttccggagggtcaggcgtgctgcggcgcgcttcacgggcacagcggagaaaaagagacgggaaaagaactcgccaagcggaatatcgcggcctttgaggcgcttgacgctgattatatcattacaaacgccggcggatgcggcgcctttcttcaggaatatccgcatttactaaaagatgaacctgaatgggcggagcgcgcaaaacaattcgtccggaagctcaaagatttttcatccgtactggttgaactgaagttccatcaaagggacctacgggcgcggtcccctcatatcgtcacatatcaggactcctgccatctccgcaatgtgatgcatacgtcagaagagccgcgcacgcttttgaaaagcattaaaggggctgagttcagagaaatggaaaaggccgacagctgctgcgggtcggcgggaatttataatataacagaatcagaaatgtctatgaaaatattagacagcaagatgaaagctgccggaaaaacggaagcggccgtcatcgtgacagccaaccccggatgccttctgcaaatgcagctcggcatcttgcgtgaaggcataacagaccgtgtccgcgcggtacatttggcggattaccttctggaagcggcggatttgtcctaaaccgaaagcagagagaccgatcggctctctgcttttatgatgctgcaatgttctgatcggcggcggatttatccgggtattgaagcctccagtctggcactcggatcacgccatacgtttgcccatttcttcacagccgcaatgataatcacaagtccgagaatgagcatgataatggataaaacaccattcagcacattgtatcctgccgcttcggggttcaaatacacatacctcaccatccaataccccgcatagttgacggtgacgtacaaataagcgaggggaatcaagcatgtcagcatatagcgccgcttatcggctattttcaatacgacggtcgcaccgatgattaatccgacagaagccataagctgattggacacgccgaacagcgcccaaatggagctgatgtcgccggaatacagaagatagccccacagcaggcaggcgagcgcgcttgagaaaatcgagcccggcagccaatctgtttttttcagcggcttatatacctctccgaaaaactcctgaatcaaatagcgggcgacacgggttcccgcatcaatcgccgttaaaataaacaccgcttcaaacataatgacaaattgaaagaaatatgaagccaaatgactaaaaaaaggaatttccgtaaaaatataagtcattccgacggcaagtgtaacagcgcctcccgtccttccttccagactgagcccgattcctttgctcaattcaggcaggtggatgacattcatcccgagcgtgcggaatatttcaggcgtgctgttaatggcaaaatagtcggcaggctcgagagcggcagcagcaataagcgccatgattccgacgagacattcaacaagcatcgctccgaaagcaacaggctttatatcactccatttatcaagcattttcggggttgtgccggaaccgacaaatgcatgaaagcctgaaatggcgccgcaggcaatcgttattgaaataaacggccagacaggacccgcgatcaccggtccgccgccgtgaataaactctgtcactgccgggaattgaacggctggatttacgaaaaagacacctgcgattaatgcggcaaaaaccccgattttcataaaactgcttaaatagtcacgcggggcaagcaaaagccaaaccggaagcgccgcggcgaaaaatgcatagacgggaagcgccaccgcgagtgttttcgcatccaatgtcagcatgtcgccgagagccgttgtttgcagccacggcccgatcacaacaccggccatcagcaaaagaaaaccgacagttgatgcaagtttgagattgcccgtttttttatagtagacgccgacccccatggcgatcggaatcgtaatccctaccgcaaacgttccccacgggttttgctcaagcgcatggagcacaaccatcgacagccccgccatcgtgatcgtaatgataaacagcatggaaagaccagtgcaaaatcccgccaccggaccaagctcttctttggcgacttcagaaagcgtttttccgtttttacgcatcgatgcaaacaatacgacaatatcatgcacggctcctccgatcaccgccccgattaacagccataaaagcccgggcagatagccgaactgtgccgccagaatcggtccgacaagcgggccggcggcagcgattgccgcaaagtggtggccgaatgacacccatttattcgtcggcacataatctttcccgtcctcaagcacatgggccggagtcggtgtctgatcattgatttttaatactttgaccatcataaaagtaccgtaaagccgataggcgatcgccaaaatacatatagacgctatgacgattgtaatcgcattcatttaatcccagccccttttctctttttctaaatattatcacaattatcaaataacaggagatgattttttgcgtaaaaaaagccgggctttgtcgccggcttttcggaacattattttcctgataaacggatgacattccaggacagcggcgtaaaatgagccgttattccttcggcgcttgcggaagatgtcccgttcgcgtgcggaatgacttgttttctgtttttttgattggtcgctttcatatcctgatgctcgagcacgatatgctcaatgatgcggtaattttcaaatcctctgagctttatctccgtttccatcagttccttgcttttgttgacggcaaaaatggtcagggtttcatcctcttcatggtaaacggcggcggcatcaacatacggtacatccgtaaaatccgcggagtcgtatttcggggaggtcaccagcagcttcattgaagtccctcttccatagacagaggcgtgcatgtaagggtaaaagatcggctgcctccacgcttctccgcccttttctgtcatgataggcgcaatcacgttgacaagctgggcgagacaggcgatctttagtctgtccgcatgctgcagcatcgtaatcagcaatgagccgatcaacagcgcatcttcaaaattgtagatgtcttcaagaatcggccgggccgtaatccacggttccacttttttatccgcttcatttgagtgataccacacattccattcatctaatgaaagctgaatcgtttttttgctgcgctttttcgctttcatataatcacatacggctgttacagatttgataaaatggtctaaatccatggacttcgccaaataattttcaagatcattttcatggttgccgtaatacgtatgcagtgagatgtaatccacatgctcgtacgtatgctccagcacctccgcttcccactcgataaaggtcggcatgccgctgtttgagcttccgcaagccaccaattcaatcgtcgggtccgtccatttcattacctttgccgtttcagcggcgagccgcccgtattcgtgcgccgttttatgcccgatctgccaagggccgtccatctcatttcctaagcaccatgtttttatgccgtaaggtttctcatacccatgcgattttcgtaaatcgctccagtatgacccttcaggatggttgcagtattcgacgaggttcctggcggcgtcgattcctctcgtcccgagattgaccgccatattcacttcggcattcactttttttgcccacgttaaaaattcattcgtcccgacttcgttcgtttctgtcgtctgccatgccagatcaagccttcgcgggcggtccttcacaggtccgacgccgtcttcccaattatagccggagagaaaattccctcccggatagcggatgaagggcacctgcaattccttgatcagctcctgtacatctgttctgaaaccgtcctggtcggctttcgggtgtccgggctcataaatgccttcatacaccgcccggcccatatgttctataaatgaaccgtaaatccgtttgtccacttctccgatgatatattctttatctaccgtaattcccgcttttttcattatgtttcctccctctctatcccttcactccgccgactgtcaggccggaaatgaagtatttttggaaaaacaagaatatgatgatgaccggcagtatcgcaaaaacggaaccggagatcagcatgtcatagttattgccgtacggactcagcagccctgaaagcccgattggaagcgtaaacatttctttcgaccgaagcacaatcagcggccataaaaagttattccagctgtttaaagattggagaatgatcattgctccgaatgccggtttcataagcggcgccataattctgaagaaaattccgaattccgtgcagccgtccattctcgctgaatcaagcagatccttcggaaggccgagcgcgtattgcctgaaaaagaacacggcgacaggcgacacgataaacggcagaatcacccccgtataagaatcgatcaaatgaaggcccaccgtcagtttaaataacggaagcatcatcacttcaagaggcaccatcataatgatcagcacaagaacgaaaataacatttctgcctttaaactcgtagacaccgagtccgtagccgatcatagaggaaaaaaacagcgtgagaaccgtggtgagaacgccgagcagcaggctgttaaaaaaccacttaaaataaatgcttcccccgtggaacaaatacgtgtagttatcaaggctcatcacatccggatcaagacgcagattcagcccgatgcgcatcagctcagatgacggctttaatgaaccgagcagcaggcagagcaacggaaagatatacagcaggctcagcatgataaaaaacaaggtaaacgcaactctgtacacaagagacatgtgattgtgacgcaccgcttatccctcccctttaaacgaaccggacagtttcagcgagacaaggctgaccagtaagatgatgagcaaaaggacaattccgattgcggcaccgtaccccatttcgttatacgcaagcccctgctgatataaataaccgacaagcgtaaggccgatattgcccggggaattattctgccaaagcacatagctttcctcaaacattctgaacccgccgataatactgatcgttaacacataaacggacaccggcttcaaaaacgggagagtaatatgccggaactttttccacgtactcgccccgtcaatttcagcggcttcatataattctttcggcacgttctgcaatccggccaaaaaataaagaatgttaatgcccatccatctccatgatgcaaggagcaccattaaaaacatcccggttcctttgttgttgagccagttttggggcgatgcgccgagcttgatcatcagctcatttgccagcgatgtattcatttctccgaacatcagccggaatataatgcccgctacgattgtcgatgttaaagccggtataaacagtgccgatttaaatacatttctgaacatgacgagcttcgaattcagaaacaccgctaaaagaagcggcaccggaatcagcacgacgagcgtccagaaggtatattccaatgtattgaataatgcggtataaaaggttggattaagaagagcggtataattggaaaacccgacaaatgtaacttctcccggcagtatccgctgaaaactcatgataaacacactgatgatcggatacaaaaagaagacgagaaacgaaatgataaaaggcgccgtaaatagataaggcgccgctttttttgaatacagcacattgcgccggcgcggctctctccggactgcagaaacggtttgcgctgactctgtctttacaggtctcataaaagctcccccgctttctctgttaaattgggcggcttcttatttttccaattgctgtgccgcctcgtccaaggcttcctcaggtgttttttcctgcgtcttaagcgcatcgaacagcacctgtctgactacgagatcagccgctttagagaagtcttcatgcagataaatcggattgatctcatcttttatctcaaggagtgaggaaaaaatggacgtaccgttccggaagaaatcagtgtacttgtttttctccttcaattcttttgaattccacacgtcccagcggagcggatcaaagccgagcaccgtccacagcttaatatttccttcctttgaacctttcgcaaatccgagaaattctttcgcgagctccagatgttcagcctgtttcggcacgacggtggctgttccgcccaagcccgctgatcggtcaccgccttctttccaggccggcatagggtaaatcgccattttcccttttaagtcaggcatataatcgataaaccgccccatgtaccaaatgggcatcagcactgacgccgccccgctctgattcataaaaccgtagtattcttcgctgtgatggccgccgccgggagccggcagaagggttttatcatttaccatgtcctttaagtaattcaatgtgtctatattcgttttactgttcagaatcaatttgccgtttttgctgaagtagcctgatccctgctgcgaaatcatggaaaggaatgtggcggagtcatttgtttcaaccgttcccatcggttttcccgtaatttcgcgcacttttttccctgcccgccggtaatcctcccatgtcttaatggaggcaggatcaacgcccgcttttttcatgatatccatgttgtaaaacatgacggtcgtccccacatgtgtatcaaggccgtacaatttgccgtttttgctgtatagggcaagacgcgcctccacaaacttatcgcggtctttttcaatcagcggagtcagatcggcaagcgggatatcctttcctttcagaaagttcgagaaccggcttaattccacgtcagctatatcgggaagcccctcacccgcgatcagcgaaacagatagattatcatgcatttgtccataaggataaacaacggtattcagcttaattttgcgctccgggtatttttgattccattctttgaccatttcctgatagaactgttcgtgcagtccgttaaacgtccaaaaagtcagctccgtttctcccggccggccggcagcccgttcttttgaacagccggcggtaaacaataagagcatcatcaccaccaaacatacagcggtcgtttttttcatgtcatcccccctccactttaggccgcgcggctattgaagcaaatgatgtgcaaagagcgctgcatgttcatttatgatggtcaaaccggtataacggtctctcagtgtgtgcgcatgcttaagcgcgtcgcagacaagttccttcttgacaccgatttcatcgaaacaggctggacctcccgcagatgtgagccacccggcaattgttttgccgtcaggaagcccctcatatgctgattgaatcgccttgcgaaagttcggcggcagttctgcaagcttttcgtgacaagccagttctttgtaaatatcactcagcaccgcgcaggcgcatcccaccttcgcaccgtggagaatcggaggctgttttgtcttcagcatttccatctcaatccaatgcgagatgtgatgctctcctcctgaggcgggacgggagtgatcaagggcaagcatgacaaggcccgaaacgatcagcgcttccatcagtatctcaatgccggtctctgtccccgcggcaatgccagcgcggtgatcaatgcactgccaaagcgcgtctttcacaagcttcgcccctgcttctgagtatggctcatctgcaagcctgcgggatatctcccaatctgccagcgatgttatttttccgagcatgtcgccgaatcccgcggctgtcattgaacggggcgcgtcttttaaaagattcgtatccgcaaagagggcgatcggcgctttcgtttgaatcgtcgttttgattccgtttaatatgagcggcgctccggccgatgtaaaaccgtcgactgacggagcggtggggaatgatataaacggcaaaccgcgctgataggcggcaaaccgtgtaatatcgtgaatcgtccctgaaccggccgcaatgattacatccgtctcttccgcgatattgatcagcgtatagaccagtgtcctctcatcagccgcagcggtcccggcttcatgctccggaatgatgagctttgccgctttaaccccgccggccttcaattcgtcagcaagcacccgtcccgctgcctcgtaagtgttccgatcacagacgatcaccggatgtttccagcattttttttgcagaaatctgagaagttcttcttttgcagtcgctccgatcacgatatcttctatttgaataggcgagcggctgcccccttctctgtcaaactcggattgaatgtccgccggagaaagtttcataaaaggattccctccttcgctaattctgtcagatctttaatagaaccgagtacgatgtcaggttcataaagacggggctccccgagtttggccgatccagtcagaaccagtacgcttttcattccgtacagcctgcccattgcgatatctgattcgagactgtctccgataatggcgcattctcccggaggaagcccgagcgctttacatgctgcttcagccatcagccaagacggtttgccgatgacaagctccgtttttgctccggcagatgcttcaatggccccgatcattcccgcgacatccatggcatggccgccttcattcggaaaggatctgtcccgattcgtggcgatgatgcgcgcgccggaggaagctgctttaaaagcgagattcagatcctcataggtgacggtttcatgcagggagatgacaagccagtctgccgcctgcggtttttgcgccatggcgacaccagctaaagcgagttcatcagtcagccctttctctcctaacacccacacctttgacaaaggataatgcttctttaaaaatgatgccgtcacactggaggacagcacgatgctccgttcatccgtccggatgccggcaccgagaagtttcttccggcacattgcccttgataaattgccgcggttgcttaaaaagacaacggatttgcccagtgactgaagggtgtgaatggcttctgctgcgccgtcaatcagctcctgccccctgaatacggttccgtctaaatcaatcagaaacccggatgcgtcaagtttggccataataagcattcgccccgtgttttctgtaaaagtgcttatcatgcagcactctgtcgatcggactgagctgtttgttcagcatgagcgaatggtaggccatttccgccactgtttcgagcactacggcgttatgcagggcattcaacgcgtcctttccccagcagaacggaccgtgactgtggacgaggacacccggattttgttcatacggttcattttgaaaggtttcagctatgactttgcctgtatgatattcgtaatcttttacaatctcttcttcatacatttccctcgtgcaaggtatagcgctttcaaaataatccgcgtgagtcgttccgagcgcgggaatgtccctgcctgactgtgcccagctcgtcgcccagcgggaatgtgtatgaacgattccgccgatagccggaaaagctttatacagataaagatgagtcggcgtgtcagaagacggcttcagcgagccttccagaatgtctccgtcctcattcaggacgaccagtttgtctgcggtcagctcactgtaatcgacaccgctcggtttaatgacgattctcccgctctctcggtcgatgccgctgacatttccccatgtaaacgtgacaaggttatgttcctcaagcttcagattggcggcgagcacttcttcttttaacgcttcaagcatagcggctctcccctttcacgaactcacggtttttaatggctttcaggcgtttcatgacattgttttctttgccgaagtagtgaacgagctctttatattccgcatataagctgtcataaatctcagctctttcgcgattcgggacataagaggcgtcttttaatttccccatatgtgcgcaggcttcagcaatattggagaaacctccgttttcccgtcccgcagcgagcgctccgaaaatcgcggaacccagtgcaggcgcctgcggagacccggataatttaatctccatatttgtgatatctgcataaatctgcatgataaaaggatttttttcagcgattcctccggctgcgtaaagctcttcgaccggaacaccgttatcccggaacgtttcgataatcatcctcgttccgaaagccgtcgcttcaatcaatgccctgtagatttcttccggcttcgtgtgcagcgtcatgccaagcatcatacccgtcaaatcggcgtccactaaggttgaccggtttccgttccaccagtcaagcgcgagaaggccgctttcccccggaataagctcagccgcttttaagcttaaaagctcgtgaatgtctatgtgtttatcctccgcttccttctcatagtccctcggaacacacgttttgacaaaccattcaaagtggtcgccgacacaggactgccccgcttcatatcccgcatatccgggcaagatgccgttatttacgactccgcacataccggggacgatatgttcttcctcgccaagcagcacgtgacaggtggacgttcccatgatcatcagcattttccccggttttgtaatgccgaccgccggcactgacacgtgtgcgtcgacattggctacggcaacggccgtccccggcagaagcccggtcagctccgccattttttcggtcagcccgcctgccttttccccgactgaataaatggttccgcttaatttatcctttgtaatcgttttcattaaaggattgagcctttcgaaaaaatgatccggcggataccccgtctcgtcattccagattgctttgtaaccggccgtacagttgcttcgcttcaatgaaccgcacaattgatagacgatccagtctgccgcttccacaatccggtctgccgcctcgtatatatgcggcgcttcttccgcgatttgcatgattttcgggatcatccattcagaagaaatttttccgccgtatcttttgagaaatgtttcatttgtgtcctcggctatacggtttaaacggtccgcatatttttgagccgcatgatgcttccacagcttcacataactgtgaggctcccgttcaaattccggcagcatgcagagcggctgtcccgatccgtctaccggcaagatggtgcaggcggtaaaatcaattcctaagccgatcacgtctttcgggtcagtgcccgtctgctgaagcagactcggaatcgccgttttcagaacttcgatataatcggctggatgctgaagcgcccagtcccgaggaagtttttctcccgtcttcggcagcgtacggtcgatgacggcatgagtgtattcttttacagcggatgcgatttcctcccctgtccggacattgacgagcaccgcgcggcctgacaatgtgccgaaatcgacaccaatcgtatacgccatatcaaatccctcccaaccggtataatacgtcattccatttcagctcttttttcagctcgcgtatttcagtattgcgggaaataaagatgctttcaatgcccgccatctcggcccaatcaagcatctgttcagccgtaagccggaaagacatgcaggtatgatgagcgcctcccgccaaaatccatgcttccgcagctgttttcagcgatggctcaggcttccacagcaaccgcgccacagggagattcggcatgtcgtgatcaatttccctgccttccgcttcattcagaacgagacggaaccgccctccgatatcaatgatgctggcgatgatggctgaaccgccgattccgttaaagaccagccgggcagggtcttctttgcctccgattgagagagggtgtacttcgattttcggctgatcgagagcgactgtcgggcatacttcaagcatatgtgatccgagaatcatcgcacggcccggttcaaaatggtacgtataatcttccatgaaggaggtttgttgtccgtccgccattattttcatcatccgcaccagggcagccgttttccaatcgccttcgcccgcaaatccgtaccctttttccataagacgctgaacggcaagccccggaagctgcttcattccgtgcagcacctcaaaggaagtcgtaaacgccgtatatccgccccgctcaagaaaggctgttaatccgagttcgattttcgcctgttctttaatagaagaaacttttgcttcatcctgtttcgtttcgtcgctgatgacatacaacttgtcgtattcttcataaagcgcttccatttcagcatcagtgacgctgttcatcacttcggtaagatcgccgattccgtatccgtctacctgccagccgaattgaatgtgagcgccgactttgtctccgtcagtaacggctacattccgcatattgtcgccgaaccgggctactttaatatgcctgctttcattccaagcggcagcagtgttcatccattgtgaaatgtcgcgtttgacttcctcatcatcccaatagcccgcaatgatttttctcgtctgccccattcttgactggatatatccgtattcccggtctccgtgagcggattggttgctgttcataaaatccatatcaatcgtttcccacgggatatcgcggtgatattgggtatgcagatgaagcatcggcttttgaaaggcggaaagaccttcaatccacattttcgcgggagaaaatgtatgcatccacgtcacgaccccggcgcagttttcttgatactgtgcttcccgcaaaacctctctgattgtttcagatgacgtgacaaccggtttatgcctgatcttatatcttgatgacaccccgctgagaccgtcacatatcccttttgcatgtttatcgacaagctgaagtgtttcctctccatataagtgctggcttcccgttataaaccaaaattcatattccttgttctgaagcacattcatttccccttcccatcaaaataaggcgctcgcatttaaaaatatacgtacgaatataaaatataaaacttctatccttttatttgtacgaacaacttcattatagttaaggaggaatcaaactgtcaatcttttattgcaagtaaaaagccggaccatatgcccggctgctcaattaataggaaggccagcctgaactccagttgatatcattgatgagcatcttcggaatcccgctgtcttcggcatcatacgcatggcgcactaaaatattcccgttcacaatgtcttgaccgcccgggcctttccagcggtcattgccggaatcaagaattgtgcctccgccttctgacatgcttttcccgcttttatcaagatatgggccggtgatgcttttggatcttccataagcgattttgtacgtactattcacgcctgaacagcatttatcaaatgacaccattaaataatagtagccgttctgataggtgatggccggcgcttccaaagctccgccgttattcggcctggcagcgatggagtaaagtgatcccgtcggtttcattgtgtttttatcaagccttgtcagcttgatgccgctccagaaagaaccgaaagcaagccaagggtttccgtccttatcaattgtcagctccggatcaatcgcattgtaatcatttgcgcttgtcgaacggatgacgagcccttcatccttccagtttcctgagctgagacttgttgatgaagcgagaccgattgcggaggtatttttgccgaatgaagaaacggcataatacagccaatactttccattataatattgaacatcgggagcccattgattcagcccgtaattcggcacgtaattgctccaccatgacagcggggaagtaaagattgatttttgaacggtccatacgccgccgctgccctcctttaagacacgaagcccccgctcaccttccaaaccggttccgaaagcgtaccacgtgtttccttctttcgccatcgtcggatcgtgaagcaattcatttgatgccccccaaaacgcggcagatgccggagatgaagacatcagcagcagcccggctgtaacggctgcgcacgaaaagcggatcaagcgtttgaatctgtttttcatttcataacccctccctttttaagcgcttacaaaatacgttgtcagatttttctgtgtctttcttattgtagccgcagggctcatatttgtacagacaaaaaaaagaatctgcttaaaaaagcagattcttccgtatctttattgatatgtaatacggtcaaccgtttcccggtccaattttttaatcacttctgtgatcagttttaccgtattctcgtaatcatcccgatgcaaaatagcggcatgagtgtggatgtagcgcgttgcgattgtaatggacagcgccggcactccattcgcggttaaatgaatggaacctgaatccgtccctcctccggcaatggaatcgaattgatacgggataccagcttcttccgccgtattcacgacaagatcgcgcaggcctttgtgagataccattgacgcgtcatacagaattatttgcggcccttcaccgattttgctttgcgcctctttttcagaaattcccggtgtatctccggcaattccgacatccacaccgaatgcgatatcaggctggatggtatgcgccgctgttttagctccgcgaagcccgacttcttcctgaaccgttcccacaccgtatacttcattcggatgatcgctgtttttcagattttttaatacatcaatggctatcgcacagccgatgcggttgtcccatgctttcgccaataaatgtttttcattgttcatcactgtaaattcaaaatacggcacaacctggtcccccggaagaacgccccattccatcgcttcttcacggctggatgcgccgatatcgatgaacatctctttaatatcagcggctttttttctggcgtcaggcggtaaaatatgaggcggcttcgaaccgatgatcccagtgatgtcccctttttttgtaacgacggtgacacgctgggccagcattacctgagaccaccagccgccgacggtttgaaaacggaggaaacctttatcagtgatttgcgtcaccataaaaccgacttcgtctaaatgccctgaaatcatgattttcggaccgttttctttgccggtttttttagcgattaggcttcccagccggtctgttgtgacttcatcggcaaatggttctatgtatgatttcatcacttgtcttacttctctctcatttcccggtatcccttttgcgtccgttaacgctttcagcatggtgagcgtttcatctaattttgtcatcaataaacctcctttttttactacccttcttattatacagaaccaatgctgaagcatacgattaattcgcctgaaaaacgggtaaatgttttatatatttctttttaaaaaaatgaaaccttttgttttgtttttcgtattacatcagatcatgacaaaggtgaggaggtgccttcacacatatggccattacagtattcaggattgtcttgcttgcacttcttatttattttatttacatggcggtcaaattctacgcaaatccgaaaagaaagctcagactggcgcagtcaaaagaaaatttttattttattgatgaacagaaaaacacgcgtaaaaatctccagcttacttataaaggagtgctctttgaaggagagaagcatatcccctccaaagatcatccgctgtttattcatacgatattcgtgtggaccgagactccggaaaagctgagcagcttttctgcagatgattatgaagaagtcgagagaaaggtattggagcggtaccccaattgcaagattgattgggaccagcccatcaaaaaagcaaaaaaagcaggcgagcgctgagctctcctgctttttattttttatacatcaaatagatcagcacaagggcgacttcggcgagaaaaagcatcggcaccccgtataaaaaagatttgtgcttcgtcttatgcctgaaggcgcgcatgccgatccatacgccgagcgagccgaacatagcggctgtgagccatatccgcttctctgagattctccacctgcgcgcttttgctcttcttttatcagcgcccataatccaaaagccgtatccgtttatcaataccgcataaatgaagaaagccattgattgtcaccctttacgtaaaaaaccgctccccggaaagagagcggctttttcaacttacttgtctaactgagctttagcagcatcagcaagctgattgaaagcagtaagatcgtttacagcaagatcagcaagcattttacggtttacttcgatacctgaaagcttaagaccgtgcattaaacggctgtaagaaagaccgttcatacgtgcagcagcgttgatacgagtgatccaaagcttacggaaatcacgttttttctgacgacggtcacggaatgcatagtttccagatttcatgacctgctggtttgctactttgtataatgtatgttttgaaccgaaataaccttttgctaatttaagaacctttttacgacgcttacgtgtaacagttccgccttttactcttggcattagatttccctcctaattgttccttgtccgattacttgatgttggcaagctgttgtttaatgcgtttgaagtctcctgcgcttacaatagcacccttgcgaagcttacgcttttgcttttgggatttgttggcgaataagtgacttgtatatgcatgagaacgttttaacttcccagaacctgtctttttaaaacgtttagcagatccgcggtgagttttcatttttggcatgggatttcctccttattgcttttcgtttttcggcgcgagcattaagaacatgctgcggccgtccatttttggttttgtttcgactgtcgcaacttccgcacatgcttcagagaaacggtccaatacgcgctggccgatttctttatgagtgattgcgcgccctttaaagcggatagaagctttcactttatcgcctttttcaaggaatttaatcgcattgcgcaatttcgtgttaaagtcatgctcatcgatcgtcggacttaaccgaacttcttttaagttaatgattttttgattcttacgtgcttctttttcctttttctgctgctcgaatcggaactttccgtagtccatgatacggcagacaggcggttttgcatttgctgcaactaacacaaggtcaagatttgcgcggccggcgatttcaagtgcttcctgacgggacttgatgccgagctgatcgccattttgcccgattaaacggacttcacgtgcacggataccctcattaaccaattgatctttgctaataatgagccacctccatagtttcttcgaattgattcacaacgctttttgactgcattctgcaggcaaacaaaaagtgcgggcatgataacacacccacactacgaacatctgcataaataaaaatgtacggtcaacctgccaactacatgaatgtgtcaatcaggtgagaagcgggtgcctctgcttgtgatttatattcaattcagtaactattctacacaataccggaacattagtcaagaatgacttatccggatcaactttttcattttaacacggtgccggggtaagcgcaaggaaaaatgtgaaattttgttctttgcaacctttgatgtgccggacaataaaaaaaccgggtctatgacccggggcttatccaccgatgagctgaacgaataccggaatgaccagcaccgtcaccactcctacgacgacaaccgcgatacttgccattgccgcttctacctctcccatctcaataccgaccgcaacaccaagtgcgtgacctgatgtgccgagagccagtcctttagagatcgggtgcttcactttaaacatttttaagaacagagcgcccagggcatagacgatcacggcgttgaaaatgacggcgaaagcggtgatgtcggtgatgccgccgatcccttttgacagcggaagggcaattgccgttgtcgccgcctgaggaagcatgcttttcataacggccgcgtcaagctgaatgccttttgcgatcaaatatactatcgtgactgagcagacagagccgacaataattgaagacatgatctgccaccagtattttttcagcttgtcacgctgtttgtataaaggaatggcaaaagcgatcgtcgcgggctccaggaagaacttaataatgtctccgccgcttttataatcttcatatgaaaaaccgccgagcttcagaaaaaggatgccgagcaccatcgcgacaaacagcggggtgaagaggaaaaagcctttcgtttttttaaataaatacgtgccgatgccgaatgctgcaagtgaaacgacaataccgaaatatggactcatctgttttccctcctaatgctgcacaagttcattttcttgattggaacggcgcaccgtttgtttatcagccgaagtttccttctgacgtttttggctgacagacagaatcagctgagaaaaaagacccgtcgcccctaacagaatgatggtggcgagtaagatgacgagtgcgatctgcacgccgtactgctgcatgacgccaagtgaattcatcacggagatgcccgacgggacaaataaaaatccgatcagtgacgttaatgatgttcccagcgtttctacttgttcaagcttaatcactttcagacataagaggacaaataataacaccaaacctactacagaagcgggtataggaatggggacaatcgctgcaatcccattagatatgagcataattacggcaaaaataaatgcttgtgtcagaaatccgtacacttttttcgcactcattttcttcacctctttctctttgttaggtccattataaaagagacaccgatttataaagcgctttcatgacaaacggcagaatattcattctgaaatgcaaaaaacggctgttgaaatgcagaaagccgcctcataaaatatgaagcagcttttttaagtcttttgcgtatgtacggctgacgggaattttagagccgtcttttaaaataagattgtaggtcgaattaaaccacggatgaatctccgtaatatgctccgtattcacgatgaacgcgcggtgcactcgcaagaagcccgtctcaggcagttttttctcaatgaccgccaaggtttcgtgaacggaataagacgcggcgaaagttttgacggaaacgtgtccgtcctccatgccggcaaaaataatgtccttcgtatctaaaataacgatagattcgccggctgataccgccagcttatgcgctccggctgcggacggctgttctgagacggcttctgccctgtcctgtttaacccttttaaactttctgatcgtctggcggactctttcttcatcgaaaggctttgttaaataatcgagcgcatcgacttcaaaggcttttaaagcaaattggtcatacgccgtcgcaaaaacgactgccggcggatttttcatgtttttcagccgtttggcaatgtcaaatccattttctcctgacaaatcaacatctaaaaacagcagatccggtttttgatccatcatgctgtcaaaagcggattcaatattttccgcttcatttatatcacttacttcattcgtccgtttcagcaaataagccaattcatctcttgccagcatttcatcatcaacgattaacaccttcagcatgttcttctccttttgtcatcagtttcaaaggcagctcaaatgatacgtctgtacctttaccggcctcactttccaatcgcagagcggctttgggaccgaacagtccgatcagccgctgatttaaattgtaaagcgcggttcccgttccttctttagacggcagcggacggtttccgagcacagacagcaattccggatcaattccccgcccgttatccccaacccgcattaaaaccgacggaccggcggataccacgctgacattgacggcacagctgtcctgctttcttgaaaacgcatggcggagcgcgttttccacaaggatctgcagcacaaaaggagggatttcgatgtcctccaaaccgttttcgatctcaagactgattttatatttcccgggaaaacgagcctgctccagtgataaatatgcctgcagatggttcagttctttagaaagcgggatgagcagctgcctcgctccctgcagattggaacggaaatagacgctgagctgcagcagaagctttcgggttttttccacatccgtgcggcaaagtgcagaaatcgtattgatcgcattaaacagaaaatgcggattgacctgtgcttgaagcgcctttatttctgcatctttcagtaatttgctctgcagttccgcctcaccgagttcaagctgggtggaaaacagcatggcaagtccttccgcgagctcttcttcaacccggcttaaacccgacgggcttttaaaatacatttttaacgtgccgatcgttttgccgtttgacgtcagcggcaatacgatagccgcatgcagcggacagggatcgtgcgtgcattcaatttcttcctttgatgtcgctttcataatatgtcccgttttgatgacccgttttgacaatccggtgatcaggcttttagacggaatatgatggtcggcacccgccccgacatgcgctaaaatcttttcattatccgtaagtgataccgcatccgtccctgtctgcctgtgaatgatggcagcaacgcttttgcatgagctttcattcagcccttggcggaaaaacggaagtgtctggtcggcaatcatcagcaccctgtgagtttcaagcgctcttgcccgctcttcttttcggataattgactgaatgatggaaagaaaaataaaagtccctgacccgtttaccaatatcatcgggatgccgatgatgctcacaagcgtccaagcgtcagaaaacggcttggccatcaaaaggatgagcagcatttgcaaagattccatcccaagcccgacaagcgcggccacccgcggtgtcggcattgcatagcgttttctgaaataccgcccgatccagccggacaaaacgcccgctaatacggacgagacggcacagctgactgcggtcgcgccgccgagtgataaacgatgcaggccggccaatatgccgactccgatccccacatacggaccgcctaagagtccgccgatttcaacccccataatccgtgtattggcaattgaaccggacggattaatttgaaacacccagtcattattcatgatcatattccgctgaatttctatccccgtatagttactgatgatactgaacagcgagaaaattgaaatcagcaccgcttttcctttatagctctcaggctgctggagcgcctgtctgaacaatctggtatgagccagaacgaatcccaatatgacgataattccgactctttccagcatcataatgatcaaatgcagcatactttttcacctgttctttcaaattttattttatcatgttttaaagcaagagacagaatcggacacaaatctgcctgtttttttcaaatcatcagaaaacaaatctttcacagtctatgtatctattgtagaataaacgggagccttgcggcagagagtttcagaatataacaaagaggagaagatcatgaaagccgtattttttgatttggacgatacactgttatgggatgaaaaaagcgtcagaacaacattcagagaaacatgtttacaagctgaaaaaaaatatggccttgacccgcacacatttgaagaagcggttcgtaaagcggcacgggaattgtatatgtcatacgaaacctatccttatacggtcatgatcggcattaatccgtttgaaggattatgggcgaatttttctgagccggtcagcgaaggatttaaaaagctgaatcagattgcgccggaatacagacgaaacgcctggacgaacgggttaaaaagtgtcggcatagacgatgcggcttacggcgaatatttagcggagtttttcgcggcggaacgcagacagcgcccgtatgtgtatgatgagacgtttgcggtgcttgaaaagctgaaaggcgtttatgaattgcttctgctgacaaacggcgaccccagcctgcagaaagaaaaacttgccggcgttcctgagcttgcgccttattttaatgaaattgtcatctctggcgctttcggaaaagggaaacccgacgcctccatctttgaacattgcctcagtcttctgcacctgaaaaaagaagacgccattatggtcggagacaacctcaatactgatatattgggagcgaaacgggcaggcatcacgactgtctgggtaaaccggacgaataagaaaaatgaaacggacattacgcctgattacgtgatcagcgatcttcacgagctgtttgcgattatagagaaacaaaaacaaagataatcacataccgaaaaaaaccccactcattcagaatggggtttttttatgtttccggattattttttcgcttcggctacagcctttttcacaaaatcgtccagtgaaacggtttcggatttctgctcgccgtatttccggacgtttaccgcgccgttttccgcttcttggtcaccgaccacaagcatgtacgggattttttgcatttgggcttcacggattttatagccgattttctcgtcccggctgtcaagctcgacacgcaggccttcacgctgcaggcgctcctgcacttttttcgcgtagtcaagatgcacagacggtgataccggaatgacttggaattgcaccggcgcaagccatgtcggaagagcgcctttgtgctcttcgattaagaaagcaacgaagcgttccatcgttgaaacgacgccgcggtgaataacgacgggacggtgctgtttgccgtcttccccgacgtaagtgagatcaaagcgttccggaagaaggaagtcaagctgtacggttgacaatgtctcttctttgccgatcgccgtttttacctgcacgtcaagcttagggccgtaaaacgccgcttcgccttccgcttcatagtaatcatggccgatttcatccattgccgccttcagcatggattgcgctttgttccacatgtcatcatcatcaaaatatttttccgtatcttcaggatcgcggtaagacaggcggaaagtgtaatcactcaggccgaaatcttcgtatacgtcttgaatcaaacggaccgtgcggatgaattcttctttaatctgatcagggcggacgaaaatgtgtgcgtcatttaacgtcatgccgcgtacgcgctgaagacctgaaagcgctcctgacatttcatagcggtgcatcgttccgagctcggcaatgcggatcggaagctcgcggtagctgtgaatgtcctgtttgtaaatcatcatatggtgaggacagttcatcggacgaaggacaagcgtttcattgtccatttccatcggcgggaacatgccgtcctgataatgttcccagtgtcctgatgtttcgtacaggtctttgcttccgagaacaggcgtatagacatgctcatagccgaggctcagctctttatccacaatgtagcgctcgatcacgcggcggatcgtcgcgcctttcggcagccagagcggcaggccttgtccgactttttgagagttggcgaacaattttaattctttgcccagttttcggtggtcgcgctctttcgcttcttcaagcatgcgcaaatgctctttcaagtcatcctttttaaagaaggccgtaccgtaaatgcgctgaagcatttggtttttactgtctccgcgccagtacgcgcctgcaaggctgagcagtttaaattctttaatttttcctgtagacggcacgtgcacgccgcggcagaggtcaaaaaactcgccctgctcataaatggagaccgtttcgtcttcagggatggcatccagcagttcaagcttcagattatcgccgatttccgcaaacatggattttgcttcatcacggctcacttcttttcggatgatcggcagattttcaccgacaatgcgtttcatttctttttcaatcttcggaaggtcatccggcgtcagcgcctgctccatttcaacgtcataataaaatccgttttcaatgacgggaccgactccgaatttcacatctttataaatgcgcttaatcgcctgagccaataaatgcgccgtgctgtgccgcatgatgttcaggccttcttctgtgccttctgtaatgatttctacggcaccgtcctcttgaatcggcgttcttaaatcaatttcctgtccgttcagtttaccggctaaagactttttctttaatcccggactgatggatgccgcgatatcttctgttgttgatcctttcggaaattcctttaccgctccgtccggaaatgtgatgttgatcatatctgacatcttcgtcactcctttttttatacaaatcaaaaaccccgccccctatgaaagggacgaggttaaataaacggaatcgtggttccacccttttttccgcgcggccgattttttcggcacctgcggctctaaactctgtaacgggagttcccgtcagctattactggcgcttattcctgcgttcacagctgaagttcaaaggcggtaaagacaatgatccatagctggaaagctttcagcctgggctctcctctcttataaagccggtatcaatgcttcatgtccttatcaatacgtgtagcaatcattaatctgttatgtattataaaatgtctgtgagaaaaatgcaactcggttttccgtctgatttcgcacagacagccccgctgctgccgcaaggccgtctgtgcggctatccttccgtcttctccgacacaaacgcgcctaacgggaagaggcgcaccctctcctgaaacacgttttgaatcgttcttgacatcatatgctccggtttgtccgtatacagttccacggtctcaggcgcaatggagatcagcggcgcaagcagatgggaatcgatatacatcgggtgctcccgcacaaaccgcctgtctatgtattttttctgttcccgttctgacacatagcgcagctcccacagcgtaaaagcccggtcatgtacgatgcggactttcttcatccgcggcggattggatgtcacgtaatctctcagagactggataaagttttgatattcctgttccatccggtattcatctatcgcagcctccgcatattccctgagccgctcataatacttgccgagccggaacgtctgaaacgaacgcacggaaaaaacacccgcatcaagtgaaattgtccggagcgcatctgaaataaactgtgtgcgcggctctttcttcggctcaaacggatgatcatcaagctctccttccataatgctgtgtgcaagctgaaggatttgctgctgttcatcctgatcggtgaagcagtatgcgtcctctatgagcgaaagcatatgctcgtcttctttacattctaaaaaaaacctgacaaatatcggctcaataaaacgctgaacggaaaaagccgattcagacctttcgattccgactttttttatgccttcacggacaataaaatgtctccggtcgtccgattgctgaatgagatgtaaaaaagcagcggtatcgtggtcatcttcaaagatcacttcaagcatatttgtccccccttacggcatctgttacaagtatatgggggatctttttaaaatagacgtaaaggttagctttcaccgccgaacaaatggcgcatcttctttttaaatatgaggggaagcgataaaaacacgatgtaaagacagatcactccgaacatggtcagcacattgccggacataaagctcgcaccgagcacattcaggacaatcgttcccggaatgatgcccgccgcggtcgccaaaagatatgtcatcggcctgactttcgaaaggcccgcggcatagctgatcacatcaaagttaacaggcagaatgcgaaggataaaaatataaaagaagccattggttttcatctgtttttgaatgatttccatttttccgtgacggcttttttctttaaaggcaaacaggcccgccgcaaaaaaagacacggcagcagcgcccattgagcctgccagcgtatacacggtgccgaaaaacggtccgaacgccaatcctccggcgacggaaacgattgatacgggaaacagcacaaaaggccttacgatggaaattccgataaacacaagcggcgcaaaaacaccgaacgataacacccaaagacggatctccttaggcgacagattcagatatttgcggtttgcccacagcaaaaggcccgctcccgccgcagccgcagcccatgtgacagccttcttattcctcattccctcaaatccttcccattggtcgccggcactatgaacggcggcggttttccccgtcaagacggacaggcgaagccaaatataaaatccgctccatcaatcttgccgctttgacttcttctttttctccccgctgtgaataggtaaaatgatgcttcagctcgtcaggtgaaaaattagacgagaagaaagtaggaagctgctggctcattctgtgctgaagcacggtgccgatgacctcatccctgacccagcttgtcattgattccgctccgatgtcatcaagcatcagtacgggcgtcgtttttaccatattcagtttctcctccagcgactgatcctggagcgagtttttcagctctctgacaaattcgggaacatatacgatcattgaggaatactctttttccgcaagctcattggcaatggcggctaaaataaatgtctttccgatgccgaattttccgtacaggtacagccctttgcctttgcccgtctcattatagctcttcagaaaatcagtcacatgctggaaaatgccgagtctgctcggatcggtaatgtcgatctgctgaaaggtcgcgccgagcagatctttctggatatacatgctcttcatcagggatttttgtcttttctggcggtcgagctttctcttttccggacattcgtaatattcaatatcaatcgaacgcccgttgatcacaagcttcggatgatagccttcaagcagactgttcgtctcgttgtcttttgaacagaaggcgcactgcttgctttgctgaacgtattcgtacagtttatttaaccctctgtcaatcatactttgattgattacatcattctgttccttcaaaaaagcctggacgtctttgtcggccatgacctgctgctgcattcgttccaggcgtttttgaaagtcaggtctcttcgttacgccttctaaggatcggctgatcggttccatttcatatcaccccgcttctctgtctcaataggcagagtattttttcagttttttcatttcttccatcatttttttcttctgttcttcaagatcctgtgcggaaagagccggctgttcaggcttattcccgttttcttcttctttcatccaatcagggcgtttttcttcccggacggtttttttgccgcgtgccgcgccgtttgttttgccgtccgcccaatcaagatattgcctatgctcttctattgcgagcttcatagcttcccgcaccgttttgactttctttctggcccagtgggcggcgattttttggatatagtttttggacagcttcatatccgttttcagcatgacataataaatcagcacattggtgacaccgggctcaagtttctgttcgaacataatatccgctatgatctgcaggtcggcttttgacggctcggtcccgtccgcaatgtcctggagcagctttctcggcgaaatggtctcaagctgtgcaatgagttctgtattcaatgaatcttccttttccgccttgttttctctcagacggacaggctgtgttttatcaatcaattccgggagcttcccgcttctttcaatttggtaccagtcgctggccgctttcctcagcgcttcggccgttatcgtatcctgttcattaattgccgtcataacgacgtgctgcatggagataggatctattccgtataaatacgaaagctttttaatactctcccgcacgtcctgtgtgattgatttgcgcggtatcatcgtttctgataatcccgctaaaaacagctcaaaatcaaacacttcctccgtcaccgtataggaaggcgcttgtccgacagacgccgtctcataatcctcggggaggttcatcgcttcttccatatccggcgtcatcttccactcactcggctggaaagaggcaaaggcgtgattaaacggccgcgtaatttcccttgcgccttcgccgacggaaggatgcgtgtaaaattgtctcagctgctggtatttcgttttaccgactctgttataaagaaagacgttcagcatgccgtcttcaaaaaattcattcggtctgagcgggggcagcagctcataaataaacatccgctccttttgctcggactcgcggatatacactttcagcagaccgattccttcaagctttccctgttcatgatgaatcttttttaaatttgactgcatcatacccatcagctgtctgtgcgtggattccgatccccacaaacggttctgctcaagctccccccataaggtcatatacagggagaatgcaaaagaaccgatcagcggctggtacagatgtgtcaaaacctgtctgtcgacatcctgaagaagcgaacggcttttgaccgtataaggatctacaggcaatacgtcattccaatagtcagccatgattctcaaaccttccgatatgtttctactctcattttacaccgtttccgcaatctatcaaatgccaattttgctcatgagaaaagagccagacacaatctcttagctctttagcgttctttctttattaaatctttcaattcatcgataaacacgtttatatccttaaactgccggtagacggaggcaaagcggacataagacacctcatcgattttcgccaggcggtccatcaccatttctccgacgagttcgcttttgacttcagatacgccttggtttcgcagctctttttcaatgtcaaagcacatgtcttccagtgtttttaaaggaacgggtcttttttcacaagctttaattaacccgcgcagcattttttcacggctgaattcttcccggacgccttcttttttcacgacgatcagaggcatctcttcaaacttctcaaatgtagtgaagcggtaatggcaggcttcgcattcccgccttctgcggattgatttcccttcgtccgcaggccgtgaatcaagtacgcgggaaccgttatgctggcatgaaggacatttcaaattggatcagctcccatctgtttcgttgctgtaatgcggttcgcaagcttccggtaaatgcccgccaacgtttctaggatgagcctattgtgttgggagagccgatagaccggccttatctttctctattttacaaaaaaaatgcttaaagaaaaagcaatgctgtttttttacattagaaaaggagcatcagcctcaaagcgcgtaatggctttttcagcttagctcccttgtgtgtgcgttttgaaaattacagtactttcgcttgtgcctgtttaatctgtacaggccccattcctctcggtatttcaatgttttctcttgtatctgcatgtaatgcgtccgcaatgtaatcagcagccacattaggatccaggtctccacaagtataaacatcaatgcttgcatatccgtgttcaggaaaactgtgaatcgttaaatgtgactcagaaataataacgactccgcttacgccttgcggtgcaaatttgtgaaatgcgacctcgcgcacctcagctcctgatttcaaagcagcatttacaaacgttttttcaataaaatccatgtcattgagcttatcaaaatcgcatccccacagctcggagatgacgtgacgccccattgtttccataatcatggaccccccttaacaagaattaaaaaagtgaatttccgagaactgacccggctatttaccacgggggaaagttagtccggagaggtcctaaccctttaagtaattccgaagcagtcacgagcaagaagttcacgaaagatagtatactgtgtttaagtttattttgcaagaagtgttttttgcgaatatgccgttaagggttttttctaacaaatgtccatgatctttattctacacagctgacgggtgtttcattcgcgcggccacgtgacggataagatcaacgacccggcaggaatatccccattcattgtcataccaggcgagcacctttacttttcggtcttccatcaccattgttgtcagtccgtcaatgatcgcggaatgtgaattcgtattataatccgaagacacgagcggctcatccgaataatcaagaattccgtacattgacgtctttgcggctctttggaaagcggcattcacttgctcggccgacacatctgttttcagatcgcagacgaggtccactaatgacacattgggaacgggaacccgtaaagcaaggccgtgaagttttcctttcagatgagggagcacgagcgacagcgcttttgcggcgcctgtagaagtcggaatgatggattctccgcacgctctcgcccgcctcagatctttatgcgggttgtcgatatttttttggtcattcgtataagcgtgaacagtcgtcatcaggccgctttcaattccgaattcctgatcgagcactttgacaaccggcgcgagacagtttgtcgtgcaggatgcatttgaaataatgacatgttcatccggattgaattgctcttcattgactcccatgacaatggtaacgtcttcatttttgcccggagcggttaaaatgaccttcttcgcccctgcttcaatatggctcatggctttttcttttgaattaaattttcccgttgcctctacgacgatgtctattccgcactctttccacggaagctctctcggatcccgccgattgaacagcataatatgtttaccgttgacgatcagactgtcttcggcggcctcgacttcttgatcgtatctgccgtggattgtgtcatactttatcaaatgagcaagcgtttccgggggatagcttgcattaatggctgttatttgaatttgatcatcttccattgcttttctgaacaccattcttccgattcttccaaacccgttgattgctacttttaccttcatgctcaggtcacccctttttaatatgccactctaattaatttttaattatatatagtataacacattaaaagaaatccgccagtacaacttgataaaaatccacccttataccgatcaatatgttgttcaatcggtttttttgcatataaaatgatcttttttccataaaaaaagcaggatcagcgtctcatcctgcctgcttttttcttatatttgttccggatctttaaatttgtcatttaaaatgctgtcctctaaaacggaagacacctcgccgtaccgtttagaaatatgcatcgcgccccagtcgcacagcgcgtttaaaattctttccagactgtgcccgtattcactcagctcgtattcgactttcggcggcacctgattgtacacgatccggttgatgacgccgtctgcttccagttcccgcaattgctgtgtcagcatcttctgggtaatctccggcataagccgcttcaattcacttgtccgctttttcccgcgcatgaggtggcagaggatcacacacttccattttccgccgatcacttcaagcgtcgcctctacggatatattgtattttttcttcagcaacggtaattcctcctcatctataggaactaaaaagtgcctatggcacttaaaagtacgttcttttcaatgacgcttctatcaatcataatgacatttgccggatgaaaagggatgtactcttatacttatatcgtttacccggcatcatttcaaccatacattatcgaccaaggaggaaaacagatgtcttcacatcgccaaagctatttaccagcgctgctggcattagccgtcagcgcttttgcgatcggcacaaccgaatttatcagcgtcggattgctgccgcttatatctcaggatctgcatatacccgtgacaacggcgggccttaccgtttccatgtatgctctcggcgtgacattcggcgcgccggttttaacttctctcacatccggcatgtcgcggaaaacgctgctgctctgggtcatgttgatttttatcgccggaaatatactcgcggcgagcgcgtcttcaatcggaatcttattgacagcgcgggtcattacggcgttttcccacggcattttcatgtcaatcggggcaacaatcgccgccagtatcgtaccggaacataaaagagcaagcgcgatttccattatgtttacggggctgacggtggctacggtgaccggcgttccgttcggcacctatctcggccagcaattcggctggaggattgcgtttgccgtcattgtcacggtaggaatcattgccttccttacaaatgcgcttctcgttccgtcaaatttgcgtaaagggacgaagaccgcgttttccgagcaggtaaaactcgtcacgaacggacggttattgcttttatttatgattacggcgttaggctacggcggaacgtttgtcgtgtttacgtatttatccccgcttcttcaggaagtaaccggctttcagaaagaaaccgtcgcagccgtcctgcttgtttacggaattgcaatcgccatcggaaatatgattggcggccgattatcaaatcgaaatccgctgaaagcattgctttacatgttcattgtccaggcagctgtgctgtttgtcttgacttttaccgcgccgtttaaaacagccgggctgatcaccattattttaatggggctgttggcgtttatgaatgtgccgggactgcaggtatatattgtgatgctcagtgaacgttttgccccaagcgccgttgatacagcatcagcattaaacatcgcggcatttaatgccggaatcgcgatcggctcgtttgccggcggagtcattacagactcaatcgggatcattcataccgcttggatcggggcgctcatggtgctcagcgcggtcgtgttaaccggatggagcaggaagcttgaaaagcgggatcacatcatccctgaaaggaggtgagtttttcttcaggcattttgatcttttcaacaaacaaataattggaggaacatatacatgacaacacatttacaagcaaaagcaacattgcataacggagtaaaaatgccttggtttggcatcggggtgttcaaagtggaggaaggcgcagaactcgtcaatgcggtgaaaacggcattggtgcacggctatcgcagtgttgataccgccgcgatttacggtaatgaagagggtgtcggtgaaggcatccgccaaggattgcaagaagcgggattaaaacgtgaagacatttttgtcacgtcaaaagtatggaatgccgatttaggatatgaagaaacgttaaaagcgtttgacatgagcttagagaaactcggtttagactatttagatttatatttgatccattggcctgtcgaaggaaagtacattgatgcgtggcgggcgctcgaaaccctctaccgcaatggacgcattaaagcgatcggggtcagcaatttccaaattcaccatctgaaacatcttatgaaagaaacggatattaagccgatgatcaaccaggtggaataccacccgcgcctgacacagaaagaactgcaggcattctgcgccgaacaaggcattcagcttgaagcgtggtcgccattgatgcaaggccagctgcttgatcatcccgtcttacaggagatcgctcagaagtacggcaaatcagcggctcaagtgattttgcgctgggatttgcaaaacggtgtcattaccattccgaaatcaactaaaaaacaccgtattgaagaaaatgcaaatgtctttgatttcgaactgtcagctgaagatatgaaacggattgatgatctgaacgaaaatctccgtgtcggtccggaccctgacaattttgatttttaatccagaaaaacaccgttcggcttcccgaacggtgtttgtttatgcccagctgctcaatatttcctccagctgatgctttgtatgttcaagactgccgctgttatcaatgacggcgtcagctttttttgttttgtccgctaaaggcatctgcgacgttatccggctcatcgcttcttcttctgtaagagaattccgctccatcagccgtttgagctgtatgtctgccggtacggtgacgacgagcactttgccgacaagatagtcaagcccgctctcatacaaaagcggtatatctaaaacgacgaactgctcttttcgcgcaacagcctcatcccgctgtttcatcatttccgcacgcaccgccggatgaacgatctgattcagcgtcagacgcttctgttcgtccgtaaaaacgatggcaccgagtttttttctgtcaatcccgccgttttccagcaggatttcttttccgaacgcttcaacgatctgtccgtaagccggctttcctttttccaccgcctgttttgcgatgacatccgcatcaatgactgtaatctttttgtcgatcagcatgcgcgctactgtgcttttgccgctggcgatgcctcccgttaaaccgatgaccaagctcaaaaagcccactccttctacattttccaaatcccgatgataatcagcaggactcccggcaaaaatgtcattttatctatccaattccatcttgaaaagaaatgccccgcgtttatgccgagtgaaacaaacagcgagctcatcaccccgacggtcacgctcatcataaccggagaaaagccgagaatggctgctcccatgccggcgccaaacgcgtcgattgataaggcgataccgagcaaaagcgcctcgactccgttaatggttccggattgatcaatatcagcgctggtcggctttttcaaaatgtgaatcacgatgccgagcgatttcacttcaagattaagtaacgttttttcatgcaataagtaatccggctctttagccggtttaaaaaattgatagatgacccatgccccgattccgattaagatcagcccgcccagtttctccgtgacggatacgggaaaaatctttgtcagaaaatggccgatcagcatggatataaacatcacagaggctgaacagcaagcgatcacggcaatcgctttgaacgggattttcatttttctcaatccgtacgtaaacccgactgaaaaactgtccaagctgacagcaaaagccaaaagcagcaaagaaacaatctccatatccgtttctccctttctcttgatcggcaattgtgacaaatgcctattgggtgaatcacaatatatatatggagaaaggtcatcaactgtgttagaaaaaagtcattcttccggcgtccgcttgaacagcttcagtttatgattttttttggcatcgggcgcagaaatgcgtacctcttccgccgaccacgattttagaaatcatcgtgccgcacgtcttgcacggctcatcttttttgccgtatacgtaatgtctgagctgaaacattccgatctctccttgggaattgatataagaccggacggtgctcccgcccgcgtcaatcgcttcctgaagggtgtctttaatttctgtatggagcttttttatctgcccgtctgacagactgttcgcttttgtctcaggatgaatccccgcccggaataaagcttcatcgacataaatgttgccgaggccgacgaccgctttttgatcgagcagagcggttttcaccgcgcggttcgttttggcgagccgctcttttaaataggcggcggtaaatgcttcatcgtcaggctcaggcccgagctgtgaaagcggtaatgcagtcagttcctctcccggcgcaaataaatgcatcgtgccgaatttccggacgtcccggtagcggagctgtgttccgtccgtcatgttaaatacgacgtgcacatgtttatcgtcaggctcatcggcctggtgaagaccgtatttcccctccatccggagatgggagaccatgacataatgatccagatggaaaagcaaaaactttccccttctcccgatggatcggattgtttctcctgcaatctgccgcgcgaattcctccggctcggcgggttttttgatgatattcggccatctgatgtcggccgattcaatcgttttccctttcacaagaccggtcagagtgcgccggaccgtttcaacttctggtagttccggcacaatcatcacttcctttttttctgtttattttgcatcgtaccaagacgggcctgaagcataatccgcctttaacggcacgtctaaatccaaagcatgttccatcacttcaggaaccagcttctctaatattttaatttcttccttaggcgcttcaaaaatcaattcatcgtgcacctgcagcagcagtcttgccttcagatttttctctttcagctcagctgccatatcaatcatggcttttttaataatatcggcggcgctgccctgaatcggcgtattcatggccgtgcgttccgcaaagctccgcaggttgaagttgcggctggtcagctcagggatataacggcggcgctgcatgagtgtcgtaacatatcctttttgcttcgcttcctgcaccgattcttccatatacgccttgacacccgggaagctctccaggtagcggtcaataaaagcgcccgcttctttccgggtaatgccgaggttttgcgacagaccgtaatcactgatgccgtaaacgatgccgaaattgacagcctttgcctggcggcgcatcgcttgtgtcacttcatcttcactgacatgaaacacatccattgcggtttttgtatgaatatccatgtcattcgtaaacgcctcaatcagattttcatctttagaaatgtgcgcaagcaccctcaattcaatttgtgagtagtcggcggcaaaaataagccagtccggttctgacggaacgaatgcctgacggattttgcgcccttcctccagccggatcggaatgttttgcaggttcggatccgttgagctgaggcgcccggtttgagtcaatgcctgattgaatcgtgtatgcaccttatgagaatccttgcgcgtgactttcagcagcccttctatataggtcgattgaagtttgccgatttgtctgtattgcagaatataagcgacgatatcatgtttgtcggcaagcttctccagcacatcggctgaagtggaatagcctgtttttgttttcttcactaccggcaggccgagcttgtcaaacaaaatgacgccgagctgttttggtgaattgatgttaaacggttcaccggcgatgtcatggattttttcttcatattctttcagtttcgcgcggagctcttcacccattcgcttcagtctttcaacatccactttaacgcccatagattccatttctccgagaatcagcgcaagcgggagttcgagatcttcatacagttcaagctgattattttctttgagcgcgtgcagcagcttatcccggaggctgttaacggcagccgcttttcgcgcgagatggtcggcaagctctttttcagccggaacggcgtgctttgcgccctttccgtaaaccgcttcgtctttggaaacgatattcagcccgtattctttcgcaacgctcgcgacatcgtcgtacgaattgcccgggttaataatgtaggccgcgagaagcgcgtcaaattccgttcccttcagctcaattccctgccagcgcagagcgacgacggagcgtttactgtcaaacacccactttttcttcgactcatcttcagcccaggatttaaacgcttcggactgaatggctgtttctttcggaatataataaaggcctgtttcattcacgatggaaaagccgagaatcggttcttcatgatagttatcaccgatttgttcgacgactaaagcggacggcgaaacgagcatgtcttcggtgatttcttcaaccgtttcaacatcgatgtcctcaaagtcttcttccgcagtttctccgctttcttcaccgagccgttcaagaagcgtgttaaaaccgaggtctttaaatatggcgacaacttgttcacggtcaaacccttgataatctaaatcttcgagcttgacttcaatcggcgcatttgtcataatcgtcgccagctctttgctcatcaaggcttgttctttatattccccgagcttttcttttaatttttttccgctgacttcatcaattgaatcaagcagtttctcaacggaatggaactgctttaagagcttaatcgcggttttttctcccacgccgggaacgcccggtatgttatcggatgaatcccccattaatcccttcatatcaataatttgcagaggtgtcagaccatacttttcttcgacgtgctccggcgtgtaatcttccacgtcggtaatgccttttctcgtaatggcaacggtcgtttttccggtggcaagctgcgttaagtctttgtctccggaaaatacctttacttcgaagccgtctttttcagcagatacggcaagcgtgccgataatatcatccgcttcgtattcaggaagctcatagcggctgatgttgtatgcatcaaggagctcgcggatgaacggcatctgttctgaaagctccggcggcgttttttgtcttccgcctttatattctttaaacgtgctgtggcggaaagtcgtttttcccgcgtcaaaagccaccagcatgtgggtcggtttttcatcctccagcattttcattaaaatcatagcaaagccgtatacggcatttgtatgaatgcctttttcattgcttaaaagcggcaatgcaaaaaacgcccggtacgccagactgtttccgtcgacaagcactaatttttttcgttccgtcattcaatatcctcctaagagcaaaagctcgtgattcctctggttttaatctcacagcttctcttattttaacaaagttcaatttgaaaggaaaatgagcgaaccccgagaaaacgcaaaaaaggacgggaacaaggaaacacgttcccgccgtcaaaattggctccttggatgaaggggttctgttacatcctaacaagataggtttaacaggtcatgaagaaaatgttaatcctttgtaaagctgatcacgcttccggcggccgcttcagcgtcacggtaaacacagtcccctgtcccggctcgcttgtgacctcgatatggccttcatgggcttctattaagtgcttcacgatggcgaggccgagccccgttccgccagagttgcggcttctgtctttatccacacggtagaatctctcaaatatccgcggaatctcttccttctgaatgccgattcccgtatcggacactttgatatcgacaacggtttctttcacgtttaccgaaattcccaccgtccctttttcaggggtataggttaaagcattgttcgccaaattcagaaatacctgcttcagcctgtgcgcatcacccgtcacaaaaatcggctcttccgggaggtcgagctgaaagctgatgcctttttccgcagccttatgctgcaaaagcgcttcaatttcatgcagaatttttgcggcgtcaaaggattctacacgcatcgtaaagttttgctgttccattttggataaatccaataaatcctgcacgagcgattggagccgttcactttctttcagaatgatagaaagaaagtctgaaagcgccttatcgtctttcattgccccgtctaacagcgtttccgtaaagcctttaatggaggtgatcggcgttttcagttcatgggagacattggcgacgaagtcctttcttatctgctccaattttttaatttccgtcatatcgtgaaagacgagaacgatgcccttccattcatcatcaggacccatgatcggaacgccgtcaacttcaaagtaccgccgttcaatgttgatgggcagtctgagcagctggcattttttcgtctccgtcataaatatatcttcgacaagccgaatgatttcctcatgctcaaacgcatcatgataaaggcggcgaagcagacgttcaggctttgtatgaaactgcttcgtgtacgaccggttcacgagattaataaagcctcttccgtctattaaaatcaaaccggaaccgatattttcaatgacggttaacagacggtcgcgctgcatatcctgcgttctcgtcatttccatcagatcgaccgccagactgttcatcgcacgcccgagacggtccgaccgccttgcgtaaccgctgtaggagcgggcgtcataattccctttggacagctccgtcgccacttttgtcgcggcgtcgattgattttttgtaacgggacgtcatgtttgtataaaagaaaacgataatgataaaagcggtacaaagacttgccgccagcatgccccacatttctccggtgatgcttgaaccgccgttgatctccgaagaaacgactacatatcccgccgtttgcccggtgtcatttttcacggcagtcccacggatcactttgcttcccgcctgtatggccgcctcatttttattgtgagacatgaactcctttacggctgaatcatcggcatgactgccggaatgatatacggtgtcacccttctcattaagcacggagacgtttataccgagggtgcggccggcgtcgtgaatcaccgtgtcattgcttttattgccgattcggccggtgtcaagaaggcccgctatgtataccgcttccttttttagctgatccgccgttctttctttagcagatgaagaaataagctgctgtagaaaaaggccgagaacactgaaaaccaatatgatacatacaacgagtaaagcgaacagacgcacacggactttattcattcatttttggctcctccagtttataccccaaacctctgattgttttaatataaatgggttttttggtatttgattcgattttgtcgcgcaaatggctgatatgaacgtcgacaatccgggtatccccggcaaaatcatagttccagaccgcgctcagcagaagatccctcgtcagcactcttcccttgtgttttcctaaatacagaagcagttcaaattctttaggcgtcaattccagctgttctgacttgaagtacgcttcgtaatgctccggaagaattttcagctcgccgatgaggatcttcccgtccttttcctcttctctgccttgtgacagtgaagaaatgtcagcccttcttaaaatggcttttacccgcgcagtgacttcccgcggactgaatggctttgtcatgtaatcatccgctccgagctcaagtcccagcaccttatcaaactcctcatcttttgctgtcagcatcaagatcggaaccatcattttctgctgtctgagctgtttacagacgtcgattccgtccactttcggcagcatgacatccaatacgattaaatccggattttctttctctgcctgttccagagcctcttctccgtctgatgcggtaatgacatcatagccggacctttccagattatactgtaaaagagtaacgatagattgttcatcatctacaactaaaatttttttgttcatgctgcgccctccgctgtctattttccccgacatccaattttctctattttatgtgttgcatatcactttatgatttcattttatccaatactgcccgttcagacaattcgcctttttgatcattttcagagaaaggatcgttcagggaaaaagaaaacgctttcattaattgtaaaaagaggaaggcttctgattcggaagccttcccttttttcttatgacaatactttcatcacgtttttgacagattcaactgatttactcagctgcgctttttcatagtctgtcagttcaagctcgatgatttgctctaggccgtttcctccgataatcgtcggtacgcctaagtaaatgccttcatgaccgtattcgccttctaagtaagcgatggtcggaagcacgcggcgctgatctttcaaaatggcttctaccatttcagtcagtgatgcagcaggcgcgtagtaggcgcttccgtttccgagaaggttgacgatttccccgccgccttttcttgtgcgttctacaatcgcatcaagacggtctttcgggataagcgtttcaagcggaatgccgcccgcataggaataacggacgagcggaaccatgtcgtcaccgtgtccgccaagaacaaagccggtcacatcttttactgacaggtttaattcttcagcgacgaacgttctgaatcgcgcagtgtcaagcactccggattggccgatgacgcgctctttcgggaagcctgattctttgtacaccgcatatgtcatcgcatcaacagggtttgttaatacaacgatgatgcagtcaggagaatatttcacgatttcacgtgtgacgcttctcatgattttttcgtttgtagatacgagatcatcacggctcatgcctggttttctggcaattccggcagtgataacgacgatatcagaaccggctgtgtcctcgtagttggacgtacctgtgattttcgcgtcaaatccttgaaccggacttgcttcgagcatgtcaagcgcttttccttttgtcgggttttctaattgcggaatatcaacgagcacaacatccgcaagctctttttgagctgtaagaaaggctgttgtcgctcccgtaaatcctgctccgataacagaaactttactgcgtgtttttcccatgattctcttctcctttttttggcttcattagaagtctgctttaggttcagtccatgtttttgatgagctcttcaccgaactctgaacatttcacttcggttgcaccgtccattaatctagcaaaatcgtacgttactacttttgaagcaatcgttttttccatagatttaatgatcaagtcagcagcctcattccagttcaggtgttcaagaagaagcactcctgaaaggatgacggatgacgggttgaccttgtcaaggccggcatatttaggagccgttccgtgagtcgcttcgaaaatcgcatgccctgtttcatagttgatgttcgctcccggcgcgattccgattccgcctacctgagcggcaagcgcatcagagatatagtctccgtttaagttcattgtcgccacgacgtcgaattcgctcgggcgggttaagatctgctgaaggaaaatatcagcgatgctgtctttgacgatgattttccctgctgcttccgcttcgctctgcgctttatcagctgcttctttcccgtctttttcgacaatgcggtcatattcagcccaagtgaatactttatctccgtattctctttcagcaagctcgtagccccagtttttaaatgccccttcagtgaacttcatgatgtttcctttgtggacaagtgtaacagatttacggccgttttcgatcgcatactcaatggcggctctgactaagcggcttgttccttcttcagaaacaggcttgattccgattcctgatgtttcagggaaacggattttgttaacgcccatttcattttgcaggaagctgatcagcttttcaacttcttcagaacctttcgcatactcaattccggcgtaaatatcttctgtattttcgcggaaaatgaccatatctgtatcttcagggcgtttgaccggagaaggcactcctgtgaaatatctgacagggcgcagacacgtaaacaaatcaagctcctgtctcagcgctacgttcaaagaacggataccgccgccgacaggtgtcgtcagaggccctttgatcgcgatgaagtactctctgatgtcttccagcgtttgggcagggagccattcacctgttttattataagccttttcaccggcataaacttctttccacgtgatttttttctcgcctttatatgctttttcaacagcagcttccaaaactttagaagcggcattccaaatatcagggcctgtgccgtcgccttcaataaacgggatgatcggattatttggtacgtttaatactccattagagactgtaattttttcaccttgtgacacaatattacctcccagtatgtaattcatatttagaaaacattttatttttcttgtataaaaaataaaatgatttttctcaagattctatcaaaattgtaaaccaacccgggcttgattaacaagaggctaacgacatgaaaatcaccagcctcccgtttgatcaggctctttcatcaatcggaacaaaagtctgcttatccggacccgtgtattcagcgcgcgggcggatgaggcggttgttatcgtattgctcaagaatgtgcgcgatccatcctgacattctgctgaccgcaaagatcggcgtgaacagatcgtgatcaatgccgagactgtggtagacagatgcggaatagaaatcaacgttaggcggaagttttttctccgacgtcacgatttcttcgacacggattgacatgtcgtaccatttgctttcacccgtcagattcgtcaggcgtttgctcatttcttttaaatgtttggcgcgcgggtccccatgcttatacacgcggtgcccaaagcccattactttttcctttttctccattttgctgcggatataaggctcggcattttccacttcgccgatttctgtcagcattttcatgacggcttcattggctcccccgtgaagcggcccttttaaagcgccgatggcggctgtgatgcctgagtaaatatcggataaggtggcgacgcatactctcgccgtaaatgttgatgcattcagctcatgatccgcatgaagaatgagcgctttgttaaacgcttccacttcgatcggagaaggctcttcaccgtttaaagtgtataggaaattctccgcgattccgtactcttccttcggttcaacgggatcaagccctttacggattcttgagaaagcggcgacaatgcccggcaccttcgcctgcaggcggatggcttttctgtagttcgcttccggattcatgacatcggcttcactgtcagtcagaccgagtaatgaaatcgctgtccgaagcgccgccattggatgtacgttattgaggggataggatttgaagtgctcaatgatttcttgtggaacggcagcttctttcgcaagctgttttttcaattcagcaagttccgttttattcggcaggcgcagatgccacagcaaataaatgatttcttcaaaacttgcattctctgtcaagtcgtcaatatcgtaccctacatatgtaagggtatcgtcgataatagagcttacagatgatgttgttgctacaaccccttcaagaccgcgtgttgctgtcatattcaacctctccttttcaatcaaaattcccctttaaagagtatataaaacatacggcttacttaaaatgagtcatgcaaacaatccctttcccctttaagaaaatgcttacatttcactggttgcggttacataaccgatatgcttatagaggaacataacaaattcttataagcttatttaagtttaagcctattcttattataaacaataatcagacatttgttaaatgtttacctataatttttttttctttctcgcacattttcttgattttacgcggttttttcatctttttccgcaaaaaaaaagcagctttcagccgcttttttactttacgaagtgaatattttaacgatttgcatggccaagtaggcgattccggcgccgattaacggaccgacggcgacgcctccgaaaagcgcgacggcaagtatcgtgccgatgaccagcgccgttgtaatatgaggatcgttttccaatagggtgagaccgtttttggcgattaaggcaacggcgatcccggcaccgagcgcgatccacgcgtaatacgatttcatcgcttctccgagctgtttaaaaccgatatcacccgtagcaatcggcactaaaacggcgattgtaatgacagtaaccccccagttgattccttttgactgaataaccggaaacagtttctggtcaagaccgacagcttttatcacgataagaaagccgacggcaaaaagcaatgactgatttttggctatcaatgcgatggccagcaataatagtaaaaataaattcgcctgtgtaaacatcctgaaagcaccatcctttatcataactgtattcatatccttttttttgacgaataaactaatgtaataggacgtgccgaccgagaggaggatcgatgtgaatccgcactatgcaactgtttttttccgcgcgctgtttgtactcgctgcggccggcggcgctttagcggccggttacgcctcattcccgttaacttatccgtttctgatcgcccttattctgtcatcggcgatcataccggttgttgactggctggacaaactgacgggtctgccccggtcagtcaatacagtcattgtcctggtcttctttttgctgatccttcttggcgcggcgacctttctggttgcggaaatcatttcgggaaccgcttatctggctaaaacgctccctccccatatcagcgcctttatgacatattgcgaagagctgttcacttcccgcattcagccattgtaccacgagctgaccgtcttatttaacgggctggaaaccaatcagcaggcatcaatcgtgacgcatatccagacgctcggtgatacagccgctaaaaatgcggggctgatgctttcacatcttttggaactggtgccgaaatggattgccttccttcccaatacagcagccgtcttcgttttcgcaatgctggccaccttttttatgacaaaggactggcacaagctgaaagcgctgctttattccattcttccggaacgggtttcggcaaacgccaaggccgtatcgggagagctgaaaaaagcgatggcaggtttcattaaggcgcaggccgtgctcatcctttttacgatgatcattgtctttatcggactttttcttttagggattgagcatgcggcaaccattgccttttttatcggactggtggatcttctcccgtatctcggcgccggatcggtatttgttccttggattatgtatttggccattgccggacagcttcctcaagcgatcggcctcggtattttatatattgtggttctcattcagcgccagctgacggagccgaaaattctaagcaagtcgatcggtcttgatccgcttgcgaccttaatcgccctgtttgccggctttaagctgttcggaattttaggactggctgcggggcctgcactgcttgttttcattcaggcatttatcacaacgggcgctttaaaagaaatatgggcctatattactgttcagtccaaataaaaacagcagccctgtaaaaaggctgccgtttttatttgataatgatccgcttgttttttgacattcctctcagccatttgaacaaaagcggcttcatgcggttccgagtgaacggaatcagaagacaggcccctgcaatatcggacaaaaaacccggaagcatcaaaagcaggcctccgataaagacgcatatcccgtccagaagcgcttcccccggcattttgccgtgctgcagatcgcgcatcacccgatgatacacatcagttccctgtctttttgccaccaaggcgcctaacacacctgtcaaaatgatgagaaggacggtcggaaaaacgccgagccattttcccgccagcagaaacaagccgatttcaatcgccggacacacgataaacagtaagaataaaactctcatttttctgccctcctgcccttctaaaaagcgtgtcaccgcccgcatgggaataggaaaatcagcctaaagacaaaagagaagggcaaatcccctctcttttttaaagctgtttaaagaacgcttgcgcggccttcatacacagcgccgcgggcagcgtcaactgtgataacctgtccttctgttaaaactgaagttgcgttctccaggcctacgataaccggaatgcccaagcttaaaccgaccacggcagcatggcttgtcagaccgccttcttcagtgatgagcgcggatgctttttcaagtgaagcgatcatgtcgcggtcagtgcttgagacaaccaataccgcgccgtctgtcattttttgttcagcttctttcgcattttttgcaactacgacaggaccgaaagcggatttgcgtccgatgccctgcccttttgcgacaatgctgccgacagtgtggactttcatcagattcgtcgtgcctgattcaccgacagaaccggctgtaatgacaatcagatcaccgcgtttcacgatgccgctgtcaagtgatttttgtaccgcatcttcaagcatttcatctgttgaatttgcgttttgtccgcttgctgggaatacaccgaatacaagaccgagtttgcgtgatacagactcgttcaccgtaacggctacaatcggagcctgaggacggtatttcgcgatcatacgcgccgtatggccgctttctgtaggcgtaacgatagctgctgcattcaggttgatcgccgtatgcgcaactgattggccgatcgcatcggtaatcgtcatgccgacctgatctctgcgtttagacagaatttctttgtagttcagagattcttccgtgcgtgtggcgatgttaaacattgtttgaaccgcctcaacaggatattgtcccgcagctgtttcaccggaaagcatgatagcatctgtgccgtcgaaaatggcgttggcaacgtcacttgcttcagcgcgtgtcggacgagggttgcgctgcatgctgtcaagcatttgtgtcgcagtgataaccggtttgccgagcgcgttgcattttttgatcatttctttttgcacgagcggcacttcttcagccggaatctcaacgccgaggtctccgcgcgctaccattaagccgtcagaaacttccaggatcgcatccaggttgtccacgccttcctggttctcgattttagggatgatttgaatgtcagacgcgttgtgctcttcaagcagttcgcggatttccaggacatccgtagaacggcgcacaaatgacgcagcgatgaaatctacgccttgctcaataccgaatacgatatctttggcgtctttttcagtaattcccggaaggttgacgctgacacccggaacgtttacgccttttttatttttcagcgtgccgctgtttaagatttttgttttgatttcgtgtttttccggatttgattcaagcacttccaatccgattaaaccgtcatccaacaggatgatagatcctgctgacacgtcgtctgccaggccttcataagaaacagagaacttttcaagtgttcccagcacctgtttcgtagaaacgataatttcatttcccgcctgaagctcaagctcgccgttttccatatcgtgcgtgcggatttccgggcctttcgtatcaagaagaattcccacgtttttgccgagctttttgcttgcttctctgatgtttttgattcttgcgccgtgctcttcgaaatcaccgtgtgaaaaattcagacgagcaacgttcatacccgcttccatcaactttgtcagcatttctacactttcactggccggaccgattgtacaaacgatttttgtttttttcaactcgttcacttccttctgaaatcttcagcttctaccgtcttaaatagacagttcttttgaaagctgatacatgtttggttcaacagtatgttttgtctctaaaatttctataatatcatggtctacaagcttgttgttttgtatacctacgcagcgtccgccttttccttcaagcagaagctcaaccgcgtaagcgccgaggcggcttgcaagaacccggtcagaagcgcttggagatccgccgcgctggatgtgccctaaaacggatacccgtgtttcaaggttcgtctcttcttcgatgcgttttccgaattcaaccccgctgcctaccccttctgcaacgatgatgatactgtgttttttgccgcggtcatgccctctcttcaaacggccgataatttcctccatatcgtaatccgcttcaggaattaaaattgattccgctccgcctgcaagccctgcccataaagcaatgtcgcctgcatggcgccccataacttcaataacgtatgtacgctcatgcgacgtagcggtgtcacggattttatcaatcgcatcaattacggtgtttaacgccgtatcaaatccgatcgtaaaatcagttcccgggatgtcattatctatcgtacccggtacacctacacatggaaacccgtgttccgttaattttttcgcacccatgtatgaaccgtctccgccgataacgacaagaccttcgatgccgagtttctttaaattttcgattcctttttcacggccttcaactgttttgaattcaggacatctggccgtgtacagctttgttcctccgcgatggatgatgtcgccgaccgaacccagctccagtttctctatttttccgctgattaatcctgaataaccgttataaattccgtatacttctacatcgtggtagatagctttccgcacaaccgcgcgcaccgctgcgttcatccccggggaatccccgccgctcgttaatactcctatacgcttcattttcctattcacctcagcaacatatatatgttaaacatatcatgatcattgccctaaaacaatgaaaagggacgcctgagctcccatgaaaccttacctattatacaattaaataaattgtttttaaataaaatttaaggaatatcacaaaaaacacaaaaaacacaaaaaataaacgtgagccataggcttcacgtctattcagtttaccccgatatattgatcctcaaccgaaacttttccgattgctttatatttttcgtagcgctgtgagatcaattcttcggcgttcaattgaagaagagattttaatgtttctttaagaatgccgtcaatgtagcccgcctgctgcttgatatcatggtgagctccgcccttcacttctttaatcatatcatctataattcctaattctaataaatcgggcgcagtaatcttcatggtttcagccgcttttttggcaaggctggaatctttccacaaaatggacgcggctccttcaggagaaataacggaatacgtcgagttctcaagcatcagcatgcggttgccgacacctaatgcaagcgcgcctccgctgccgccttccccgatgacgatacaaacgacaggcactgtcaggccggccatttcgaacaggttcttggcgatggcttcactttgtccccgttcttccgccgctttgcccggatacgctcccttcgtgtcgatgaagcagataatcgggcggttaaacttatccgcctgcttcatgaggcggagcgctttacggtagccctccggatgaggcatcccgaaattgcggacaaggttttctttcgtgtcttttccgcgctgatgaccgataacggtgaccggcatgccgtgatatttggcaactccgccgacaatcgccgcatcgtctccgtacgttctgtctccgtggcactcaaaaaagtcagtaaacaggtattgaatgtaatcaagcgtcgtcggccggtcgggaaggcgtgcgatctgcactctgtcccacggtttcaggtttttataaatctcatcctggagcttgctgagccggtcttcaagccttgcgatttcagcgcttaaatccatctccgaatcctgggtgaattttttcagttcggcgattttcgtctggagttcaattaccggtttttcaaattctaatcttgcagccactcatgctcacctcctgtttggtgcatgtccagcagaaatgcgagtttgtctttcatgtcgtttcggtgaatcaccgcatcaagctggccgtgctttaataaaaattctgccgtctggaaatcttccggcagtttttccccgatcgtctgttcaataatacgtcttccggcaaatccgatcaaggcgcccggttcagcgaaattataatcaccgagagacgcgaaactcgccgatacgccgcctgtcgtcgggtgggtcatgaccgaaataatcaggccctgctcctcactgaacagtttcagcgcagagcttgtctttgccatctgcataaggcttaagaccccttcctgcatacgtgcgccgccggaagcggtaaagatgatgaatgggactttttcctcttttgctttttcaattgccagcgtgattttttcgccgacaaccgatcccatgctgcccatacggaatgtcgaatccatgatcgcgatcacggcagggaatccgctgatggttccttttccggtaacaaccgcttcattcagcgatgttttctcgcggtctttttcgactttttctaaatatcccgggaaaccgagcgggttttcagatatcattccctggttgaattcttcgaatgaatcttcatccaggaggctttcaatgcgctgctttgcattcatcgggaaatggtgcccgcagttcatgcagacgcgcaggtttttatctaactcttttgtgagcatgatttttttacatttcgggcactttgtcataatgccttccggaacatcatgttttgcctgctcagacggcacggaagcatattttttcttttttgtgaatatatcctttaacaaatgattacctcccttttgtgaagggttctcttcactgcatgtcttccgattagatagacttaataataactttaccgaaactattgtactttttttgtcaaacggtgtcatcctccattcgacattttttgctgtaaaacagacggaaacaggaggattccggaccgcaaaaagcgttgctcagccttatctgtcagcgttttcaaaagaaataaggattctgctgaattttttttaagacctgcccttaaaaaaatgccagcagtccgtatattgaacagcagcgcgttgtttttcccaacgcgctgccatttcatttttgtgttattattcgccgatgaccgtcagctgtcttgttttttcagccacttcctcagggtcgaccgtaattctggcgacacccgtttccatcgctgctttcgcaacagctttcgcaacggcaggagccacgcgtttgtcaaatggagccgggatgacataatccgcgcttaattcatcctctgaaacgagggaagcgatcgcttcaaccgcagcaattttcatttcttcgttgatgtgagtcgcgcgaacgtcaagcgctccgcggaaaatgcctgggaatgccagtacattgtttacctggttcgggaaatcagaacggcctgttccgattacgcttgcgccggctgcgcgcgcgtcttcaggcatgatttccggattcgggttggccattgcgaaaataatcggatctttcgccatgctttccaccatttctttcgttagagcgccttcgactgaaacgccgataaagacgtctgcatcttggatgacatccttcagcgaaccgtctttgcggtcttggtttgtaaacttcgccacttcgtttttcaccgcgttcatgccggccggacgcccttcgtaaatggctcctttagagtcgcacattacgatatcgcgtacgccgaaatggtaaagaagcttgatgatcgcgatgcctgccgctcccgctccgtttgcaacgactttaatggatgacatggattttcctgataatttcagcgcgtttacaagtccggcaacggttacgatggctgtgccgtgctgatcatcgtggaacacaggaatgttagtttcttttttcaggcgttcttcaatgataaagcagttcggcgccgcaatatcctcaaggttgacaccgccgaatgtcggttcaagcagcttcaccgtgtcaatgattttgtccacatcgtttgtgtcaagcgcgatcgggaatgcatccacacccgcgaagcttttgaaaagcaccgctttcccttccataacaggaagagatgcttcaggtccgatatttccgagaccgagaacggctgatccgtctgttacgactgctaccatgttccccttcattgtataatcatatactttatttttatcgttataaatttctttacaaggctcagctacccccggagagtaggcaaggcttaaatcgtctgcatttctgacttctacctttgcttttgattcgagttttccttggtttactttgtgtaaatgtaatgcttcttctcttaatgacattctaaacactccttttaagtactttgttacatattctgccgcatagactggtacaatctctggaggtgaaaaatttcagaatctttaaataagatagcacaattgtttcaattgtataacaaaactattgttgttaccactattttaacacgacgttttcgcggcccagcagctcttttaaacggtataacgcctgatggtcggcctgaatatgaaaagtatcgggcagcctgatggtctgcttgtccttttcgtaataaagataaacgccggtttcccctttatgctccagtaaaatacgcttcatcttttccagaaactcctgattgtgccggctgccttcgattttgatgtaaacagacggcgctctgtctgcctccgtctgctcaaggagagaggcggatgacataataaattgtatcttctcctgccgctcttccatttttccggacgcgaataaaagcgcgccttcttttaacagcggagacagccttctatattggtcaggaaacacgacggcttccatttctcccgtttcgtcgcttaatgtgagaaacgccatatgctgacctgtctttgtccgaatcgttttgatgcctgcgagcaaagcgccgattgacagctgtcctttcggcatctgcagcgctgttgcgatcgcttgcgccccccgttttttcaagagattcctgaaagctgacaaaggatggcttgagaaataaacaccgagagcttctttttcaaaccgaagcttgtccacgagcggaaattcctctgcctctacatattttggcttaatggagaacgattcttccaaaaacaatcccatttggtcatcgtctgcacgaaaaagctcagcgtgctctaaagccacatcaacggaggccagcaaggcggcgcgattttgattgaattcgtccatggcgccagaaaatataagggcttcgattgttttccgattaacgcttttggcaggaacgcgaaagcagaaatcgaaaagatcctcgaacggtttatgtgttcttgctttataaatatctttcactgccgagacgcctacgttttttatggcccgcaaactgtatctgacggcgccgttttcaggtgcaaacggaaaaccgctcttattgacagacggcggaaggacttggagcccgctcccctttgcttcgtgcagatattgcgatattttgtcctcattgccgatgacgctcgtcaaaagcccgcacataaaatataaaggatagtgagcttttaaataggcgagctgatagccgatcatgctgtatgcgacagcatggcttctgttgaatccgtagttagcgaatttgacaatcagatcgtagacctcgtttgcagtgactacagaatactccttttttaagcacccttcaacaaaatggcttcgctctctgtccaaaatgtccttttgctttttgctgacagcccgtctgagcagatccgcttcacctaatgaaaaacctgccatgcgcgaggcgatcatcataatctgctcttgatagacgatgacgccgtacgtgtcactgagaatatttcttacatcctcgtgcgggacttccacacgcgcccgcccgtgcttccggtcgataaatagcggaatattttccatcggccccggcctgtaaagcgcgtttaccgcgacaatgtcttcaagccttgacggcttcagacgcttcagcacattcctcattcctgatgattccagctgaaaaatccccgtcgtatcgccatttgataatagcgagaacgttttttcatcctgataagaaatctcggaaaaatcaattttcgtatttgtctctttttcaatcatcgtcttaatggattcgataagcgtcaggttgcgcaaacctaaaaagtccattttcaaaaggccgagatcttccaagtgatccatcgcatactgcgttaaatacacgccgtcatgcccttcctgcagagggacaacttcagaaagcggctctttgctgagaacaacgccggccgcgtgtgtagacgtatgcctcggaagaccttcgattttccttgcgatctgaaacactttatgaagaacggcggattcagacagccgcctgttcagctgagcggactgccgtctcgcctcctcaagcgtcattcccggcttagacggaatcaggcgggcaagctggtcggcttctttcgggctgattccgaacactctgccggtatcccttaacgccgcctttgcggccaatgttccgaaggtgataatctgggcgacgtgcatgctcccatacttattttgcacatactgaatgacctcatcccttctcgtatcagggaaatcgatatcaatatcgggcatgctgatccgctcgggattaagaaacctctcgaataacaaagaatgtttaagcgggtccacgtctgtaatgaaaagggagtaagcgacaagcgagcctgccgcagacccccttcccggacctgtcacaatgcccttttcatgcgcgtacttcataaagtcccatacgatgagaaagtaatcactgaatttcatgcgcctgatgacatccagctcatattcaagacggcggacagcacgctcatcaggagtgccgaaacggagacgaagcccctcatgacagacttccgccaaatagtcatcagctgatttgccgtccggcgccgggaaagacggaagctgtgtctgtccgaggctgacatcgacttggcattgctgagcgacacgtgcggctgctttgaccgcttccggattcttcatataaatattttccatttcttcaggcggcctcaagtataagtccggcaggtccccgctctgatcctcccatttctccccggctttaatggcgcacagacagcggtacgcatcttgatcttctttcttgatataacggacatcccccgccgcgcagacagcgatttccgtctcggctgacaggcggagaatttcttctgataatgtctcatgtcctttaaacggctggtaccctaaataaaaacggccttctccgaacaattcccggaatccttcggcaacccgaaccgcttcttcaaactctcctgcttgaagcaggctttcaatgtacccgttttcaccgggcgtaatggcgatcagcccttcatgatagctcttcatccattttcgcttcatgccgccctttgctatggattgcagcgcacttgagattttcagcaggttctgatatccggtgtttgtctccgccaaaagaacaagcgggcgtgcttcaagctcagtttcgtccgtgtatattgaagccgtcagaccgataatcggctttattccgtgtgacttgcatgctttataaaactcaatggcgccgtacatcacattttcgtccgtgagcgccaatgaagaatatccgagctccttcgcttgtgtaacaatctcttttacagaagcggcgctgtttaacaggctgtagccgctacgtacttgaaggtgaacaaaagacaatgccgccactcctttcccgtatacgttcaatttgcctttctacattataagacgggttttcttaagaaacaaatgttcttttttgactcatcatcatacttgtccgtttcgctcaatatgatagaaaagtgaggtggtgtatatatggatcaggaagccggctttatggcgaattttatcagcagttattttatcgccctcggtgttttgctcggcggagcgctcatcggcggcgtcggagcttatttatcaggcgagcctccgcttacagcgattacaaaattggcgaacaggctgaagatctgggcgcttgtcgcggccatcggaggaacgtttgacgcggtatacagttttgagcgggggctgcttgaaggcaacacacgcgacattttcaaacagcttcttttaattatttcagcaatgggcggcgcacagaccgggtggctgattgtttcatggctggcacaggagaatatttcctcatgagaattcccgagtattataaaaaaccgggatggcagcgtttttttgcgggaatgatgtgcggagccatcgtcagctggctgttctttctgtttacatacggaacgtttcaggaagaacaggtgacgttaattcaaaaacagcgggagcacgcacgggatttgaaaaaccagatctccatctatcagaaggatcttcataaattaaatgaggataataagcaaagactgcttatccaaagcgtcgatgtgaagctgatcaatggagaaaaatacagaatcgcccagcccgataagatgaaatttgaagaacaggtgaaagataatatttcggaagtcatcacaaaggatattgaaagtgtgtataaaacaaaggaacttttaaaacggacgattgaaaacaaggtgtacaccataaatgagaaggaatataaagctgaagtaaaggaactgacgatttatacgagattgtctgtcgaaattcatatttcttttgcgacgtaattatgtcatttttaaaaattttccatagatctgtcgcttttttctccgcttttttataaactgtaaatgagacattttcaatgattctgaagggaggaagggaaaatggaggtttttagtgaacgccgcttggcaaaagatcatgcagaccgaatcagaaaaggctattccgcatatgcagaaacagacacactcgcttccctcataaaaaaagaactccaaatctgtaatctccgcgtctacgaagacctgactgaattcggctgctggttcatccccgtgacagatgaacactaagaaagagggtctcccctctacttgtgttcgttacatacctcttcaagatcagcaagaatcggaccggtttcatcccagctgtagatggatgcgccggccgccagcggatgtccgccgccattgtatttccgggcaattccattgatgaccggaccttttgaacggaaccggactctgatttgatcgtcttcttctatgaagaatacccaagcgcgaatacccgaaatatttccgagtgttccgacaagctgcgatgcttctgaagcggtggttccgtatgtctccaaaatgtcttttttaatgaaaacggaagcgacgccgttgtcagacaatgacacattttgataaataaagccattcagcttcaccacatttaattttgtttcatacaattgattgaaaagctctgacggtgaaaaagggaactcaatgagctctcccgcgtatttgaatgtcttttttgtggtgttcgggaataaaaagcgtcccgtatcactgacgatacccgcgtagatcagcttagccgctttcgtattcagcttccagccgtgctcttttccttccaggtacagctcatagatcatttcgcttacggagcttgcattcgtatcgacccataacagatcgccatatggatcttcatttggatggtggtctattttcatgagctttgcgccggaatgatagcgctgatcgtcgatccgttcttggtttgcggtatcgcacacgatgacaagagcatctttataggtttcgtcatccacctcatcgagggaatataagaaagacaaggacggctcaggctgtccgacggcaaaaatatttttttcgggatacgtttcccgcaggatttccgtaaggccgcactgtgatccgtaagcgtctgggtcaggcctcacatgtctatgtaagataatggtgtcatataatgatatggttctgatcagttcggatttcatcgttttctcctttttgtttttattcatttaatcatactctttatccgcggaaaaggaaaatctttcaggaacggtataaacagttttgcaaactcatataatggaggatttcatttatgctggtttttgtttttctcatcgggctttctgcctgcttttacgtgtattacaaagtaaaaggcatccagacgaaacgggcgctggagaaggaattcttttcggctaaatcaagtatggcgttaggcgcgctggtgcttttgtacggagtaaatcaaatgattctgtttcactccgtcctcacccttgtcatcggcggcgttttcattttaatcggagcaggcagcgcatgggccgggtataaagcctataagcattatgaacccatccatgcaaaggaagcggagagggaccacgcataatgaatgtcaagggaccgagatgcgtcccttagcttctctccatcagctgcaccatcagcatcgcttttgaaacgatgccgctttggcttgacacttccacttccattttcccgaatttccggcccgcttctaaaatgcgcggtttcacttcaatgaccgattccatctgaacgggttttaagaagaaaatcgtaatgctttcaatgaccagctcgccgcgtttgcgggaacgtaaaaatcggctggcggcctgggttaaaatcgttgtaaacaccccgtaagaaatcgtcccgagctgattggtcatctgcggcgtgacttcatattgataaacggccggcgttttatcatcttcctcttctttaaatccccttgaaacgatatcatcaagcttctccccgacctgaggctgcttttgaaccatttgaagcgcttttaagacatcctggcggctgatcatcccgatcagtctgtggtgcccgtctgtcaccggaagcacttcgattccttcccaaaccatcatttgagccgctgaggcgacagacgttttcccgatcaccgtgacagggtttttggtcattactttttcaatcggaactgatcggtcatgcccggcgatatctttcgatgtgaggattccgtggattttcatctgctgatcgatgaccggaaagcgtccgtgtccggtttcatagtttttttcgtaccatttctccagcttatccttaggagacagcgtcactgtccgatctgcgggcgtcaaaatgtcctccacgagcacaatttctttttttatgagctgatcataaatcgcccggttgatcattgcggctaccgtgaaggtatcatagctcgtggagagaatcggaagctcaagcatatcggccagctcgataatgctgtcatcggtattaaaccctccggttaccaaaacagccgcacccgcttcaagcgcctggcggtgagcgttgattctgttcccgacgattaacaggttccccgccgctgtataacgcatcatcgcgtcaagctccatcgcgccgatcacaaacttgttcaacgttttatgcagaccggcttttccgccgagcacctggccgtctatcacattgacgacttcggcgtatgtcagcttttcaatattttcttttttcttctgctcaattcggatcgttcccacacgttcaatagtggaaacaaaccctttattttcggcttccttaatggctctgtaagccgttccttcactgactttcatttctttcgcaattcgtctgaccgaaattttttcaccgacaggaagcgaatctatgtatgataggatttgttcatgctttgttgccaagcgtttcacctctaaggacagtcttctgcttttattataagggcacgggggattcattcgcaatgagacgcccgaaaaaagacggcaccgcaaaaagaccttctgaatgcgtgattcagaaggtctttgacattatgtcaggcaagctcaatggtctcgccgaccgccatgactttgccgacgccaccgggcagactttcggcgaaagcgtcagggtcctgttcaatgacagggaatgtattgtaatgaacgggaacgacttgtttcgccctcagccattcagccgcgagtttcgcatcttcagggcccatggtgaagttatcaccgatcggcagaaacgccaggtcaatgtgattcagttccccgatcagtttcatatctgagaacagcgccgtgtccccggcgtggaaaatcgttttgccgtcaatcgtcaataaaatccctgccggcatccctgtgtatgtgatggttttgttttcttcatcagtgactgccgatccgtggaatgcctgtgtcagtttcactttgccgaaatcaaattggcgcgccccgccgatatgcatcgggtggacgtttaaacctttaaagccgagataaacggccagctcattcggcgcaataacgagcgcatcgttttgtttggcgatctgctctgtatctccgacatggtcattgtgtccgtgagtaagcaggatgacatccgctttcacttcttccggcttcagatttgtcaggctgtttccggtaataaacggatcgaaaataatgttatgggttttcgtttccacatgaatgacagaatgtccgtgataagtcactttcatcgttttcacctcataaaaagttaatatttatcaagttcccttttcgacaaacgaaaaaacttacagggattgatgcctgttaatcacattcagcccgcctgttgcttctatgaccgttccggttacaagatcggaatcttcttcacataaaaaggcgatgattctcgcaatgtcctctccggttccggacctgccgatcggcgtgttttctttgccgatcttccgtcttgcttcttctatagacgcttctttcatatctcctacaatatcacccgggcagaccatgttggccgtaatgcctgattcggcttcttcaatcgcaatggttttggttagcgaagccaatccgactttagccgctccgaaagcggaacggtgcagccagcccggagcatggtcagctccttgaaagccgtatgtaataatccggccgaaccgctgctgtctcattaccgggataaccgctttaaacagatgaaaaacggcgcttaaattcccttcaagcatgtcataccattcgtgatcggaataatcggcaagctttttgcgctcaaatatgtacggcccggcattgttaatcagtatgtcaatccttccaaaccgctgaagggctgcatcggcgatccgcatgagatcttcttttcgggttacatcgcccttaacgaattgcaatctgtcatggcaccggggataatcggccttcagacaagcgaccgcttcttcgtcctgtctgtaattcactgtgaccgaaaagcctttttccagcagcatttcagtcacttttcggcccaatcccttcgtaccggcagtgattagagcatgtcgcacattgaataccctccccaggcaacgttgccgcttcaatagaataaagtcgtttctccctctactttactataaacaagcggcaatatcacttttttgcacttcaatcgcacgaaaaaaagccgtctttacagacagcttaattttctgaaggggctgaggcttcctccaggccgacataaccgctttgatatgcctctgagatgagccgggccgtttcttcactttctttttcatcataaatgtaacggtcttgttctttgcgcattccttctacctcccatcattatagatgtagggtgtctgatatgacgggaaaatatgaaggtaattttagcaaattaaacgccggcgcaggcttttgcttttacaagtgcctgttttacctgctgaaaacccgttccgccggcgctcattcttttttcaaccgcgtgatgcggatcgagcacggtatagatatcttcttcaaagagactgctggcttgaaggaattctgcaaacgccatatcacttaaataaattcctttttcaatgcagctgtacacaagcttgccgaccacttcatgcgcttctctgaacggcatgccttttttggctaaataatcggcaagttcggtggcgtttgaaaaatcttgttttgtcgcctgtttcatgatgtctttgtttacggtcattgtttcaatcatgcccgtgaaaatctgaaggcttccttcaacggtcttcaccgtgtcaaacatgccttctttatcttcctgcaggtctttgttgtaagcgagcgggagccctttcataatcgtgaaaagacccatcatatcgccgtatacgcgaccggttttcccgcggatcagctccgccatgtctggatttttcttttgcggcatcatgctgcttcccgtcgcgtacgtatcatccagttcaatgaatctgaattcctgcgagcaccaaaggatgatttcttctgagaaacgtgaaaggtgcatcatgagcatgctgctgctgcttaaaaactcgagaataaaatctctgtcgctgactccgtcaagactgttctcataaatggaatcaaagccgagcagctccgccgaataattacggtctatcggaaacgtagttccggcaagcgccccgcatccgagcggcgatatatttatccgcttcatggcgtcacggaaacgctctttatcccgttcaagcatccaaaaataggcgagcagatggtgggcgaaagaaatcggctgggcccgctgcaaatgggtgtaccccggcagaattgtctcgacattggcctccgctttttcgatcagcgctttttgaaactgttcaatcagcacgatgatatgcgagacatggtctttcaaatataaatgcatgtcggtcgccacctgatcattccggcttctcccggtatggagcttgccgccgagcggtccgatttcttcgatcagcattttttcaatattcaaatggatatcttcataatcaacagagaattcaagcgttccttcctctgctttttgcaggagggtctgcaggccctgacggatggcgctttcttcttcttccgtcagaatgccgcattttttcagcattgctgcatgagcgagagaccctgtaatatcctctttgactaagttttggtcgaatgtgatggatgcgccgaactcatcgacccacttttccggtgttttttgaaaacggcctccccaaagctttttcatgcttcaatctgctccttctttttcacaatgctgtttacttttgtcggcagcccccagagctcgataaagccgattgccgcgtgatggtcaaaagcatcgtcttttgtatatgtggcaagtttttcatcatagagagaatattccgacttacgtccttctacaatggcatggcctttaaacagcttgacgcgcacaacgccggtgacgtgtttttgggtttctttcaggaatgcaagcagtgcgtcttttaacggtgagaaccataaaccgttataaatgatttcagacagtttttgttcaattgccggtttgaaatgagccacttctttcaccaacgtcagatcctcaagctctttgtgagccgtaatcaaagtcattgcgcccgggcactcatagacttcccgggacttaatgccgaccaggcggttttcgacatggtcaatccggccgattccgtgctttcctgcagtctcgttcagcttgagaattaaatcagcaagcgggtaggatacgccgtcgattgaaaccggaacaccggcttcaaatgcgatttcgatgatttcaggaacgtccggcgtgttttcaagagatgctgtcaggtcatatgccccttcaggaggcgccgcccacgggtcttctaatataccgcattcattggcgcggccccacagattctggtcgatggaatatgggctgtcaaggttgatcggaatcgggatgcctcggcttgcggcatattcgatttcttcttcacgtgaccactgccactcacggaccggagcgatgacctccagatcagggtttaatgatttgatggatacttcgaaacgaacctggtcgttgccttttcccgtgcagccgtgcgctacggccaccgcgttttctttttccgccacttcgacgagttttttcgcgattaatggacgggataatgcagatacgagcggatacttgccttcatacattgtatgagcctgcatagaaatgagcgcgtactcccgggcgaattcttctttcgcatcaatcacataggagttcacggcgcctacttccagcgctttttgctgaacgaatgccaaatcctttccttcacctacgtctaagcagcaggcaacaacatcgtacccctgctcttgcagccattttatcgctacagaagtatcaagtcctcctgagtatgccaatacaacctttttttgttctgccatgttaaaagctccctttgtataaaaattagttttaattaataaaaatgcattttgtatgtatacactgtaacaagtaacttttgttttttcaagccttttataaaaaaaactccacccaattttttgagcggagcagagcctttttatacgtttataaatcttttcggatttcccggagcacatgaggcagttcaggaataatcagtttactcattgcaagcctgacggcgcctgaggagcccggtgtgcagaagaccgcggtattttggattacacccgccgcggctctggacaaaatggcggcggaaccgatgtcctctgtatagctcagcatgcggaacagctcgccgaatcccgggagctcttttgaaaacagcggcgtgaccgcttcaatcgtgacatccctttcggcaatgcccgtccctccgtttaacagcaccgcatctgtatattcatccatacagccggataaaacggctttctgcaattcatctttttcatctttcacaatgtcataagcgaccgtttcaaatccagcttccctgatgaaatccatcatgacgcgtccgcttttatcggtttctttcgttctcgtgtcgctgaccgtgatcaccttgcagcgaaccgctgacggggcttcttgtttatgttcatgcacactcattgtttcacctcatcatttatgtaataaacatatcgtaacgtttgattgtgcggcattcaataaaaaagcacaccccttgggatgtgctttctttcgattattactgtgcaaggcggacaacgtcgcgtgcgatcatgacctcttcatcagtcggaatgatgatgactttgacaggagagtgaggatagctgataaacgcttcctcgccgcgcacgttgttcagcgcaggatcccaataaacacccatgaattctaagccgcgaagtacgcgttctctgacttcaacgctgttttcaccgataccggccgtgaaaataatggcgtcaacgccgctcattctcgccgcgtaagaaccaatgtatttatggattctgcttgcgaacacttcaagagccgtttccgctctttcgttgccttcttttgtagcttctacaatatcgcgaaggtcgcttgagaagccggatatgccaagcagtccgctcttcttatttaatgtatttaatacttcatccgccgtctgatctgttttttccataatatacggaatcaaggcagggtcgatgtttcctgaacgtgttcccatcgccacacccgcaagcggggtgaagcccattgacgtatcaatggattttccgccttcaacggctgcgatacttgctccgttacccaagtggcaggaaatcaggcgcaaatcttcaagcggacggccgagaagctcagctgcgcgctctgtcacgtatttatgagacgtgccgtggaaaccgtatttgcgaatgccgtatttctcgtagtattcatacggaaggctgtacagataagattgctcaggcatcgtttggtggaacgccgtatcaaacactgcaaccgcaggcacattcggaagcacttctttaaaggctttaatgccgacgatgtttgccgggttgtgaagcggcgcaagttctgaaatctcttcaatctcactgattgtttcatctgtaagcaaaacagaatcgctgaatttttctccgccgtgcacaacacggtggccgattccgtcaatttcatttaaatcctttataataccgaattcagtcagcttgtgaagcagcatcttcaccgcaaccgcgtgatccggaatatctgtgacttctgtatttttttcgccgttaacagagatagtgaaaacgctgtcggcgataccgatccgttctactaaaccttttgttagcaccttttctgaaggcatttcgaataactgaaattttaaagatgagcttcctgcgttaattgcaataattttagacataaatgacgctcctatcaaaattcttcttcgtttgtttcgttcttttttcccagaccgtaactgcagtccaaaaaatatctgacttttccatttaaacattgtcaactcagcatttcaagtcaacatccatattggtaccgcttacaatatgaagtcgttattttctgataaattcttcttgtgccaaatggacggcacggacttacggaattttattttctttccttaatttgtgttatttccctgatttccattcattttaaacagcaaaaaggcagcgcggattctgggtcacgcgctgcctgttcggccattatttttctttttgaatccattgatccaattttgccatcatctcccgcatcgcctgctggttcgcgaaggaaggaagattcgccaaaagcgtttgtttcggcgggtttgcgtctccgccttttttctgcaaaattaaaatgctctttgcctgcgcttcgtctttaaacagagtagccggcagctgaagaagagcgttaatatacactttttccgccaaaaactgcttcagtttatcgctttgggcgctgtcaaacaaatgattcgggatcataaaaaataagtatccgcccggttttgtatgcttgacgctctgctcaataaataagtggtgggcaaatgagtggccttcatctgctttcagctcaaacgcttcagcgccttcgtcattcggatagtagccgaccggcagatcgcagatgaccgcatcagcctgttcgataaataacggctgaagactgtcctggcagaacagctccatttctttttcctgcagattcgcttgggcataagcaatcttcagaaggacatcatcaatatcaatgccgaagctttttgccgctttgtcagaaagctggtttgccgcggtcagcagaagatttccggtgccgcaggcggggtccagcaatgtcaggcctttttggctgcccgtaaatttattcacgaggtaactgatgaaaaggccgatcgtatcaggcgtcatctgtctgttcggatgggatttatctttcagcccttttaaaatggcgagctggaacgccttgcggatccattcatgctcccattttttgaagtctgctttcgcaagcaggcttttaagctcgccggtttgcttttcctgaagcggcagctgttcggccgtttcgagaaaatacatctctcccgcttccgcaagcccctcaatataggacagctgaaggccttctgctatcactttggcggcttcatctaaaagttcataaatctgaccgacatggtcgtgttgcatactgtttcctccttgccatgaaaagagctccgcggcagcacccggagctctttctcaatctttacttgattaacgcttttgcagcttcgataggcttttcataattcgggtggtttgtcgcttcacttacatattcagcgtaaacgacttttccgtcttggtcgagaacgaaaacggaacgtgccaaaagacgaagttctttgatgtaaacaccgaatgcttcaccaaatgacatctctttatgatccgataatgtttcaactttatcaattccgttcgctccgcaccagcgcgcttgtgcaaacgggaggtcggcactgattgtataaacgttcacatcaccgagttttgctgcttcttcgttgaagcggcgcgtctgtgcatcacatacgcctgtgtcaatggaaggaataacagatatgatcgttacttttcctttcatatctgctaatgtcttctcttctaatccgtttgtcaaaaccgtaaagtcaggagcttggtcacccggtttcacttcttgtccgatcagcgtcacggctccgcctttaaatgtaatttcagccattctgattcctcccttatctatgtatagctctatcatagtcgagtttcaggcaaactgcaaaggttatgccgcatcgtaaaaaaagctaactgcgggcggcagttaacttttctcttataaatcgatatccgttcttttttggttccggcctttttcattctttttaaacatatgctggatgcgttcaatcgtttgaggcgcggagtctaacaatttatcaatcagatgggtgttttcgtctaaatgaagcatacgcacgccgtttgttccgacaatcagaaacgcaatcggcgtaatggatactccgccgccgcttccgccgccgaacgggagcttctgctcttttctttcatcgtcctcggttcttttttcagccggctttcctccaaactcgcttccgcccgccgcaaatccgaagccgacttttgataccgttaagattacgctgccgtcaggcgtttcaaccggatcgccgatgattgtatttacgtcaatcatttcttttaaattttccatagcggttttcattaaaccttgaatgggatggtctgccatatgcgctcctccttaaactgatgaatcattctttgaagcaaccggaaccggctgtttctttcgtatgatagaaagtccgttccgcccgtatttgagcaatttgaaagctgcacctataagatgtccaaaacgaaaaaagaatatacactgcaaatgcgtcttggaagcaggcacttgaaaagacggaatgacttcgcacaccggtttatgtataaaacgcagatggtcgtacagcatcgccgtaaggcccccctttacggcccacacgcctccggcggcgattcccgtaacggcagcgtcctttattccgataaccgtcacccattcgaacttcgtcacacggactcccgcaagaaacgaagcaccgatttggcgcatcctgacgacctgttgcagaatcatttctattctgtcaatggtctgtttgacatcttcaaatgtgatttttttcttctttttctgctggcctttcatttcggatttcgtgtcctgtttaacatcaattgacgcatcttcgctgtttattttaatgacgggccacgttttttttatacggatcagcccgtataaggccgagagtttaaacgtcattttgtcgttatctttatcatgcagatattcgaaagtcagatggattttcatcctcatgagcagccaggccaaaatgagaatgagaataacagctgctgcggcatatcccataagcttcacttccttagctgcattatcgccaaatccaaaaaaaataaacccggacgtttctccgggtttactgctttttatttacggtacagcgcttcgtgaatcaccgtggtgtcagcaatcagatcgtgaattccctgctttttgggcgtaaacgcaatgacgatgtaaagaatccagattttatcgatataacgccccaccgcttctctgaaaatgacggtgccccatgtcagcggctttccgggcgccaaaggagtgacctttaacccgaaaaccattttgccgagtgtctgatgaaaccattttgtcatgaacacaaaataggcgaggtagacgatcagggttgtgacggaatagactgagattgtaaacattccgcttgttttcgggagattcatcagcgtgaaaaccggtgaaacgatgagatggttaagtccccagatcaccagccaatcgagaagaaacgcccaaaatctgatccaaaagcccgcgtatgccggctcgagcgcctcctgttgtgcggcttcctcttctttgccttgaaagccttcgtaaatcgcgtccattctttcttcccccctactttgcatagagatacatcatccgcggcgaaccggattgcgaaataagctctttcatattcagaaaatcaatttcgcttttaaacattttcgctgcgctcatcgaaaagagcgagcctaatccgaatccttcttcgtatgtgatgactgaagcgtttttcatatttttatgatcctttttcatcgcgctgatcgtatcatcgtaaaaaccgagttcatcaacaaggccgatttttttagcctgtctgccgtcatagacacggccgtcggcaatttttttcacatcagcttttgacatgtgccgcccttttgaaatgacattgacaaatccttcataagaatcgttgaccatcgtctgcatgatctttctttcttccttcgtcatgtcgcgggtcggagacatgatgtctttatgcgcgccgcttttaatcgtttcaaatttgatgccgagttcatcggcaagcttagagtaattgacgctttccataatgacgccgagtgagcctgtgagcgtttccggtgaagcatagatcttatcggcggcggttgagatatagtagcctcccgatgccgccatggagcccatggatacgtatatcggtttcttcgtttctttctttagttcttccagttttttatgtatttccgcgctttcgtatacgcctccgccaggggaattgattttcaggacaattcctttgacgtttttatcttctttcgcacgctcaatatgttttaagaacgatctgtgatcatacccgcctgagctgagcaggcctgcggactcgccgctgtcctcgatcgtgccgtccacttcaagcacggcgattttactgccggggctgccctcatcaagcgtcacttcctctgagtcatctgtcagcgaggcaaagccaccccctgtatctccgacatttttcagcaccccgacggtcacacttgcgattactgatacgccgaaaatgccgatggcgatgacgagcgcaatccatctttttgcattcattctgttctgcctccttttctgtcaatattcgtacgttcccccgtaaaaaaagattcatttttttcatgaagcgctttcacttaacggataaacaggaaacatgttacactattgccacaggtattttaacacaatacctgatgggagaaaaacgtaaatatgacagcaaaggggaatggagatatgaccgatcttcgccgcaatgtttatttttttcacaaacaagacaacgaaacaaaagaacaagtcagctctcttatgcaattggctgaatcgcacggttttacagttgcggctcacccggaggatgcggggattatcgccagcatcggcagcgacggctcatttctgcaggccgtcagaaaaaccggattccgtgacgactgcctgtatgtcggcatcgctaaaaaaggaaaagcccatttgtactgtgattttcacagcgatgagcctgaaaaaatggcggacagcatgaccgcggaacagcttgaggtcagaaaataccctcttattcacgtaacggtggacggcagcaatcattttcactgtttaaacgaggtttccatccgttcaagcattattaaaacgtttgtgatggatgtgttaattgatgatcttcactttgaaacattcaggggagacggcatgatcatttccaccccgacaggcagcacagcctacaataaatccgtatcaggcgcggttgtcgatcctttgatttcctgcatgcaggtatccgaactggcctctttgaacaacaacacatatcgaacactcggatctccgtttattttaagctcggacaggaagctgacactgcaagtggtgcaggacggcaatgagcatccgattatcggacttgataatgaagcgctcagcacgcggaatgtcaaaaaagttgagattacactttccgataaaaagatcaagacggtgaaactgaaagacaactctttctgggaaaaagtaaagcgctcatttttatcataaaaaaagaggacgggcattaacgcctgtcctctttttcatatacaatacggccgccgacgacggttttgacagcttccagtttatgaagacttttcgggtccattttaaacggatcaccactgagaatggtaaagtcggcatcatagccgggggctatccgtccgcggctatgttctttatggatgattgccgcgcttccctccgtgtaaagctgaatggcttcgtacacggtcagacactctttttcataataggccggaccttcagggtgctgcttgctagtacggagcacagccgattgaatgcccagaagcggatcggccggttctatcggggcatctgaacctccggcgcacagcagcccttttgacagcagtgttttccaggcaaaagccgttttcatccgctcttcgccgagccggtcaatcacccacggaaaatcactggcgacaaaatgcggctgaagatcaaggccgatcggaagccgggcggctctttcaatcagaccgtcatctaaaacctgcgcatgaatgagcctgtcaagctgtccgggctttgccggatatctttcgataacatccagcaccttttcaaatgcgaggtcgccaatcgcgtgcacggcgatttccatccctttctctctcgctttagaaacaagagaggcaagtgttttgtcatcatgcacctgaacgccggaaacagacggatcatcatgataaggctgtttcaatagggctgttctgccgccgagcgcgccgtctgcaaagattttcatcgctccgtattccagatacgggccggtcgacttgtccagagtgctccacctgtcgacggcttcgtgatgaacgagcagatgggcgcgaaaaggaaaaaggccgctgccggttattgactcgtacgcggcaacgggaacggacgcgtctccgtagtatgccagatcctctgaatgcccgccggtcaggccttttgaccagcagtccgtgaccgccgtttgaagagcgcgtttgacatagtgaagtgagacgggcggaagagcctgtgtcacaagctcttgggctttatccagcagaaggcctgtcggaccggcgctgtcccgggcgataatcccgccgtttggatcaggtgtttcgtttgtaatcccagcagctcgcaatgcggccgaattgaccgcaacggcgtgcctgcatacccgcttcagcaggacgggacggtcgggaaagagcgggtcaaggtcatgcttcgttacgtaaaccggccgctcaaacagattttcatcccagccttcgccgatcagccattcaccatcttccaattcacgctctgcttctttaacggcttgcagtattgcttcttttgatgtcagctgcgacaaatcaaggcgaagctgtttttcaccgtgtccgattaaatgcatatgactgtccgtaaacccgggaaacatgactgctccatgtaaatcgatttcctccgtatcaggcgaaccgtatgtttcacggagctcctgaaagctgcccgtctgtctgatgacgccgccttcagtataaacggcttcagtgacatggttctcctcaagcattgtataaatggtgccgccgtgccaaatcgctttcatccccgctcaccctttttttatattatgcttttttatccgccttcagccgttcttcgcgctgtctcagctccacccgtctgatttttgcagacgccgttttcggcagactttcgacaaattcaatttctctcggatatttgtaaggcgccgtaatcgtttttacgtggttttgcagttctttgacaagtccgtcactgcgcttttcatcgttttgcaaaacgacataggcttttacgattgaacctctgatttcgtccggactcgccacgacggcgcattctttcacttccggatgcttcacgagcgcgtcttctacttcaaaaggcccgattgtatatccggagctgacgataatgtcatcattgcggctttcaaaccaaaaatagccgtcctcatcctttttcgcgcgatcgccggtaagaaagtaatctccgcgaatctgctttttcgttctttcagggtctttataatattccttgaataaggccggtgtgctcaagtgcacggcgatatcacccgtttcgcctgtttcgcatacttcgccttcatcgtttataatttcaacttgatttcccggtgtcggtttccccatgctgcccggcttaatatccatattcttcaggacgccgactaacagggtgctctccgtttggccgtagccgtctctcactttaatgccgaaatgtttctggaatacgtcaatgacttcccggtttaacggctcacccgcagaaactgcgctgtgcagagcagaaagatcatatttgtccaattcctccacctttgccatcaggcggtattcagtcggcgtacagcagaagacattaatctgatggcgctcaagcagttctaaatacgttttggcgtcgaacctgccgtgataaatgaagcctgttgcgccgcttcccagaacggcaagcagcgggctccacacccatttctgccagccgggcgccgcggtggcccagaccgtatcgtcttcagaaatatccagccatgcgccggcggatgtttttaaatgggcaaaggcccatccgtgtgtatgtacaacgcctttaggctggccggtcgtgcctgaagtataggataaaaatgccatatcctctcttgttgtatctgctgtttgaaaactgtctccgtccgcttcaatggttaagaggtttttccagccggcatcattttcaccaatagacaatgtcacgagctgatcggtgttcacctcgtcaaacgcgtttataaatgaaggataaacgataacgcccttaacatcggcgtgtttgatccggtattcaagatctttagcacgaagcatctccgagcaaggaatgacgaccatccccgcttttaagatcgctaaataaacggcatacgcttcaagcactctaggaaccatgacaatcagcttatcgcctttttcaaacccgaaacctttcaggcgggctccgattttattcgtttcttccatcagtttttcatacgtccagactttcttgctgcctgtttgatcctcccaaataagcgcgttcttctctttggaacggctgaacttttcgatttcattcacaaggttatagttctttggggcgattaaatcttctcgttttaacacgaacaactcctcactttctttccccattatacataaacataggacgttacaataaagatatgcataaattgcttcccgccttctatctttattcatgaaaaaagagcggggaattccccgctctcttagccattatgtgaagttgtgattaaaactgttgctggttgcttccgcccatgctttgctgagcaaaagaaacaagacgttttgtgatttctccaccgacagaaccgttggcgcgagaagttgtttccggtccaaggtttacaccgaattcagaagcgatttcatacttcatttggtcgatagcttgagcagctcctggcactaaaagctggttgctgtttccgctgtttgattgttgtgacatgtgtatcacctccttgtgagtatagaatgtgataaaacacatgtcctcattcaaaaaaactttggtaattgtatacagttctaaaacaggtccgcgaatttatcgtgagcttcttgttctgagtaaacagttatcgtttcgatgccggcagccgcctctgcaatcagcggttcaaagtcaacaaagctttcgaagtgctcgattttttcttttttcgggcgtgttttcggacttggcggcgtaaagatggtgcagcagtcctcaaacggctgaatgcttgtttcataagtgccgatttcttttgatttctcgataatttctgttttgtccattccgattaaagggcgcaaaatcggtgttgccgtcacggcattgatcgcatacatgctttcaagcgtctggctcgccacttggccgaggctttcccccgtaatgatcgcgagcgcttttcgttcttctctgattctgtctgcgatttgcagcatgagacgccgcgtcgccgtcatcgtatagttttccggaatttgtttttggatgagttcctgcgtttttgtaaacggcacgatatgaagcgtcatactgcctccgaaccttgcaaggcatcccgcaagatctatgactttctgctttgcccgttcgctcgtatacggcggactgaagaaatgcacggcttccactgataatccccgtttcatcgcgtaaaacccggcgaccggactgtcaaaaccgccggaaagcatcagcatcgctttacccgcagaaccgacgggaagacctccggcgcctttttcatcacgaatggtcaggaatgtcgcttcctccctgatttcaatccgaagcggaatatcgggattcttcacatcgacggttaatccttccgtgtttttcaaaatgtggccgccgatctcagcgttcattgcgttcgtatctaactcaaactgcttgtaagcccgtttggtcgcgaccttaaaagtatttcccggtgtatattggccttccatcgcggctaatgccgtttttttaatgtcttccagcttactttcgcatttaattgcgagactgaagctctgaatgccgaatatattctttaataaggaacatatttcctccgggttttctccattaagagtaattgacatccggtcccggttggaaaagtattttacttttttataatcctttaataccaggcggatattctgttttaatctttctataaaactgcgtctgttttttccttttgtggatatttcaccaaaacggattaaaatatgatcgtaattcatatgctacctcatcattttttttagtttttgaacagccggcaccagcgcggccataaacggctctgtgatgtcagccgtgtggctgaagttcaggctgactcggatgctgcttgatgcaatctgttcgcctttattcatttgcaggaggacacggctcggtttgtgctctcttgctgaacatgccgcggttgtggagacgtatattcctttttcctcaagcatgtgcagcagcacttctgctttcacacccggaacggaaaaattaatgatatgcggcgcgctgttttcagcaggagtgttgatgacgaccccgtccgtcctgcaaagcctttccataagcgcattcttagcagcttccactgaagaaagccgctcgttcatgtcacgtgcggaaagattgaccgcttttgcaagggagacggcacccgctgtatgttctgttccggcacggacgcctttttgctgcgagccgcccgtaataaggggaatgagccgcgttccttttttgacgatgagcgccccggtcccttttaagccgtgaaatttatgccctgaaatggtacacagatcaatgcccgcttcttctatagacagggggactttatgaatgccctgtacatgatcaacatgaaacagaatattcccatgctgtttcaacagtccgccgatttcctttataggctgaatggagccgacttcgttattgacatgcatgacgctgacgattatcgtgtccggcctgatagccgcttttacgtcttttaaagaaacgaagccgtcttgatcgaccggaagatatgtgacttcaaagccaatcagctctgtcagctgatcaagcgtctccgtcacagaagggtgctcaatcgctgaagcaatgatatgtcttcctttattcatgttggcccaggcggctccctttaacgcagcgttgttcgcttcagtcgctcctgatgtaaatacaatatcataattttttaaacccaaggttttttttatttgctgagcggccgcttcaaggagctgctccgtctcagttcctagccggtgcagagacgaaggattgccgaaataacggctgctcgtctgtttatacacatccaaaaccttttcatacggctcggtcgttgagctgttatctaaatatatcatttttttttactccttttatgaaaacggtacatcgtatgatatttatgctaccataacaaaagtaaatataaattcgcaataaatcgagtattgacttctctggacattgcaatataataagtaatgttcgttttgttatattatctgacaattaattgacagaatatttcaacatagtatttaggaggacttttatgaaacactcactacctgtcaaagataccgtgattatcggtttcatgcttttcgcactttttttcggggcaggaaacatgatatatccgccggagctcgggcaagcggcaggacataatgtctggaaagcgatgggcggtttcttactgaccggcgtaggtctgccgctattgggtattatcgccatcgcattaacgggaaaagatgcaaaaggacttgccgataaagctcatccggtattcggcacgattttcaccgttgtgctttatttatcaatcgggccgctttttgcgattccgagaaccggaaccgtttcatatgaaatcggtgcagttccgttcttaagcggtgttccggaaagattatctttatttattttcactttaatctttttttccattacgtattatttagctcttaatccgtccaaaatcgtggacagagtcgggaagattttgactcccattaaattcggtattattttaatcattgtcattaaagccatcgccactccgatgggcgggctgggcgccgtacatcaggaatactccggaacgccggtgttcaaaggatttttggaaggctataaaacaatggatgcgctcgcttcaatcgtcttcggtgttgttgtggtcaatgctgttaagagcaggggcgtcacccagcgaaaagcgcttgcggccgcttgtattaaagcgggacttattgcagcggcaggtttgacattcatttatttatctttagcctatttgggagcgacaagcacaaacgctgtagggccgctcggcgaaggcgcaaagattttatcagcttcatccgattacctgttcggttcattaggaaacattgttctcggtgccgccatcaccgttgcgtgcttaacgacgagcatcgggcttgtcacatcttgcggcgaatatttttcaaaattgattcccgctttatcatacaaaatggtagttacgattgtcacgctgttcagcctggcgatttcaaatttcgggcttgctgagatcattgcattttcagttcctattctatcagccatttacccgctggcgattgtcattattgtcctttcctttattgataaaatctttaaggaaagacgggaagtctatatcgcctgcctgatcggaacggggctgttcagcatcttggacggcttgaaggcagccggcattccgctcggatcactagattcattcttaaacgcgaaccttccgctttacagcattggaatcggctgggtgcttccgggcattgccggagcgatcatcggctgtatcatcacgttttttaccagcccgccaatcgaattgaataaagcgaaatcgtaacattcagcgtctgcggcttgacgtatatcagccgcaggcgcttttttatattccgggagaaacaaaaaaactgcacctctgatttccatcagggtgcagtttttgcttgtacgctatgaagcagattgatcagctttaatttttttcacggcgccgggagccgctttttcaaccgcagccgccgccatctcgtaagcttcattgtagctgtaagcgtaaaacagccgttccgcttctttcagctgttcggataaaatgtgattctggcttcggaaacggtttccgtactggatgatccgctcaataagcttcacctgaatcaccagttcttccgcctcttcactgacttccgcaaccatcttttcagcttcattcagatgtttggcggcttcctccatgtttaacggcagctcttccaattggctgacggttttttctatatgatgatttgccgtctcgagcttgtccttgacctgttcaggaatacccggcacattgcttttttgcagcattctcgctgtgtcagaaatggttttccgaaggtgcatcagcgtttcacgcgcctgcagttcttcttttctgagcgcttgcagattttcacggtattcggcatgttctttctgagcctcttccatctgcttttcgatggcctcaacttcttcaatcagcagagagtaagcgacatgctctccgtcaagtttttctctcgcctgctcaaggagccggccgatcgtttccatctgtttttcaaacgcatgctgtctgccgatttctcccgccgtcagctgatagctttccttgacgagctctgtttcggtttttgtgcggtctttttcttcctcaagcttctcatacgcgatgatcagttcaggcattttgcttaagacggactgtccggcttccacttcgccttccagctgttcatacatcgattgaattgtttcatcaatcagctgaagaatggcggacgcttcgtcgacatccaattcttccaaaagcgcgtgttctgcccgtttcacttgatttgtgagtgtctccagctctttttcgatttgaatatgttccagtttgtagcctttttccgtcatttcccggtagccgtctttcagcttggcaatttggttcggcacggtctgtttacagtccgcgagcagtttcggaacgtcatctatgtatgtttgaagctgatccagcctgcggtcctgttcaagcagcacttttctcgctttgatgtaattgccgccttccgtctcttcttcgaactcttttatgccgctccagatttcgtcgagatccgtctccaggctgttataaagctctccgtagagatggctgtacgccagaaggttcttccgcgcttttgaataccgctcacgcacctgttcaatctctccgcggcttttttcctcgctcgtcacaaggtcgctgatctcacgcaggatgccttctatatttgattcggcggcggtgaggagatcgtcgatgtggacaagcacctgattcgcttttttaaaccggtatttgtcggcgttctcttcggcatcataaaggagctcttctactttcggcagatgggctgtgacaatttcatcccactcctcgcgccatctttcaaagaactcttccgtctctccggtcattttcagatgtttgatcttggacatttcttccacaatcgaacggtttaaaatttcaatcttccatgactccagccggtcaatttccgtataaatttttttcctgaaaaagtagcccgccgcaaagagtgcgagcagtataaccaataatccgatgactaactccataatgagcccccttgttgttctcataatctgtcagggtgttttatgtattcagaaagatttcaatatatgtattgagaaaatctgtcgttttcattgttattatgataccatgtaaccaacattttttgaccagaaatcaaaaactttttgcataatttcggcaggattctgcaattttttaatggagtgacaaaaatggaaaaacgagacgctcatatccacacgcctttttgccctcacggctcgaaggacgcgctgaaacaatatgtcgaaaaagccctggaaagaggctttacatctatcacatttactgagcatgcccccctccctccgtcttttcaagatcctacaccgcttcgagacagcgcaatggctctcagagagatggaggcctatttggaccgggtctcacaattaaaaaaggtatacatgggacaaatcagcatcctgacagggcttgaaaccgattttatctcagggtatgaggaggaaaccgcggcgtttctgaatacatacggcccctcactggatgacggcattttatctgttcattttttgaaggccggcccgtcttatatatgcctcgattatgatgagcacgcgtttcagcggctcgccgcgcacttcggaagcattgaagcggtatatgagcaatactatgaaactgtgtattcttccattgtaacaccgctcggcccctttaagccaaaacgggtcggccatatcacactcgttaaaaaattcgcgcgccttttcccttacagcatgtcacctcaaataagagagcttgtgacccgctgccttgacgctgtgaagaagcacggaatggagctggatattaatacatccgggctcagaaagaagtttgccggggaagtatacatggaggattggatggcggagacggcgaagcaaaaaaaaatcccgctcatattcgggtcggacgcccatcaagcggaagatgtcggcagtttctatgaaacgtacaaaagcatcattacttcataagcaccgcatcaggccggcgaaacacgctttcgatccaaatcttcacctcttcaaaatactttttataaaaatacggttcatgaggctgcatatagagcacctccgtaatatattgtggctgaagatacggcatcatcaagagggatttcaattgcagaataaaatgcggcacgggcagcgtcagacgcctatcgcgtgactgcccttcttcgatcaccagctggaaaatatatttttctttcattaaataagtagacataatttccctgataagcacagaatcaatcgtcacttcccggtacacaaaccgcgttaattgacgatgatcgtgctgataggataaaatatcaaaaatcacccgcaggatgcgttcctgtgcgtcttcaccgttcatactgacggcggcgttttccagcgcctcagtgtagccttcgtaaaactcggaaactaaatgttccattaatccgcctttccctttaaaatagtaggagatgtgcgcaacatttacatcagctgactttgcgatttcacggacggacgtgccggaatagcctttttggttaaacagctggacagcggcgttaataattttgtctttggtgcttactttcatacggctcacccctttatgttaccaattcaagccgaagggcgccgttcctgtaagaacttctcgacaaatgccggcagaacggccggaactttgtttgatattatagaaaaagtgagggttttccatgtttcatgtcgaaaaacaatccggagataaagaaaaaagttatcagcttctgcttaaacagctcgaagccatgacagaagatgaaacagatgcgatcgcaaattacgcgaatgcgtcagcgcttttataccattccttacatgaagtcaactgggcggggttttactttgctaaagagggcgagcttgtgctcggaccgtttcaagggcttcctgcctgtgtgcgcattccgttcggcaaaggcgtatgcggcactgcctactctaatggcgcagtgcagcggattgccgatgtgcatgcgttcccgggacatatcgcctgtgacgcggcttcccagtcagaaatcgttcttccgatccgcgtaaacggtgaagtgatcggtgtgctggacattgacagccccgtgaaaaaccgttttgatgaaacagacgaatcctatttagcacagtttgttgaaacgcttgaaaaacgattaggataaaaaaaaggagttcggcccgcgggccggctccttttttacgtcgccgtgctgttttgatggatgatcagccggtttttaccgttccgtttggcggtataaagcgcctcatccgcttgctgaacgagcattttcaacggcatcgggtcagtctttgaccagcaggaaacaccgcaggaaatcgtcacgcgcggttcggtgttttcccggatggcgcggaccagccttctggcgatgcgttccccggatgatacgttgatattcggcagatagacagccagctcctcgcctccccatctcgcagcgacatcgtgctcccggatatggtttttcataacggaggccacctgtatcaggatcgaatcccccgtttgatgaccgtatgtatcattaatgtttttgaaattatcgatatcaacgaggatgaatacaccccgtttatgaattttcatgctgtattgaattttctcatccaaataggttcttgaatacagctccgtcagctggtctgtctgaacaagatgctcaagcctgtcgcgcagcatggagttcgtgaccgccaatgtcgcatggtgaatgagcgcctgaaaaagcttatacatttcaaacgtaaaagcgtataaatcctttttcaataaaatcgcgaatccgaagacggtgtcattttcgatcatcggcaccgccatcagcgaaccgtagccattttcgccgaatacagtctttccgctgccgataaacacacctttttctccttcgaacagcttttctttcacaatgctgatgtatgcgtccgcgcgttctgtcttaaaaaaggcggtatgcccgggaagcagattttgcgcttcaaaatggtcaatatgaaaaaaagccacttcttccgcatgaaacgattgaatcataatagcggcgagctcccgcatcgtatcagtgagcctgagacgctgattcagctgacgcgatgtttcattgatgagctcaagattcgcaatgctttttttcgattgctcatacagctgcgcattttcaaatgcttttcccgctgcgcccgcaagcagcatcatttcactcagagaactgcacgaaagcgcggcatcctgcagcccctcagccttcagaaccccgtaagtcccctgctggcctttaatcggcaggtaagcagatgacctgcctttcctgagcattctgcctgacaaataaaccttcagggcaaacggatcggcatcttctccgtccatatgcaattcttttgcggggagctgtctgtccgtatcctgatcctgcgagataaacagtaaaaaacggaaagactggaaagccttcctcaaactcgcctgcagtttttccaatacttcatcctgatctaaaagcgaatggaacatttctgtcattttgtgaattttccgctgatgctttgttttgtcaaacagcccgctttgtctcacagattgattgataaattgagtaacgagctcaggcaatgattccgggatcggaagtccgctttccgagcgcagataaaaggatctgccggacgtctgattcctgatcataaaacggccgtcactctctttcagcggagcataattcggttcctcttctgtttttatggtgaaacgtgttgattcagccggtgaaagggtcaatgaaagagatgtaaagcaggattcaagagctgaggccagccataacagcgagtcggataatgagacggattcagatttcgtcaagaaaaaagaaagcattttctgatgaaaggccgtaacttcatcgattgtttgttttttcatttttatcacctaaacatgtactactcatttttgtacattatatcataaaccgacagtcttcatggagaaatggttgacggcggccgggaaaaatcatataatgttctttgtgtgaaatattgcagcctttttgttcagcttctgtgttttcattttgttccttagctgtaaggtgtatcgtgtaactctctgctgctggagcgaggatacatgaaaacaaaatgtgcacggtcggatcgaacagacggtttttattttccacaaaataaaaccaaacaaaggaggagtcacattatggctcgctatacaggtccatcttggaaactgtctcgccgtttaggaatctctcttagcggtacaggtaaagaattagaaaaacgcccttacgcaccaggtcctcacggtccgggacagcgtaaaaaactatcagaatacggtttgcagttgcaagaaaagcaaaaacttcgtcacatgtacggtgtaaacgaacgtcaattccgcacattgtttgacaaagctgcaaaaatgactggtaaacacggcgaaaacttcatgattcttttagatgcacgccttgataacgttgtgtacaagcttggtcttgcgcgcactcgccgtcaagcacgccaattagttaaccacggtcacatccttgttgacggaagccgcgttgacattccgtcttaccaagtaaaacctggtcaaacaatcggtgttcgcgaaaaatcaagaaacctttctatcatcaaagaatctgtagaagtaaacaacttcgttcctgagtaccttacttttgacgctgaaaagcttgaaggtacattcactcgtcttccagagcgctctgagcttgctccggaaattaacgaagcgcttatcgttgagttctactctcgttaagtaaaacgctctttaaagagcattggattaaaccccggaaatgttgtgatgacaatgtttccggggtttttcttttggttgtgtaaactgcccccgtactcagccgtttatcccggagaatataaaaagcacccgttcatccgggtgctttttatcgtatttcattcttccatcacaccatactcagctgcggttcgaataattcgtagtggatcgattctggcggtgtattgaattcagaaatcagctttttcattgctttaatgaatgacggtgagccgcacaggtaaaaatcagcatctttatctgtcatcacttcttctaaaagccgcttgtcaatccggccttcccgaaaacgaatgttttctgaacggtcttgttcggacggctcgctgtaaataaagacagtgtcaacggatgaatgttccgcagcttcctcagcttcatgccgcaaagcatgatactctccgctccttgccgcatggatgaaaagaacatttcgctgcggctgggttttcacaaccgtttttaacatgctgatcatcggcgtaatcccgacaccggcactgatgagaaccaggttcttctttgaggcagggtccaatatgaagtcaccggccggggcgctgatctcgattgaatctttttcatgtaattggtcatgcagataagaggaaacaaccccttcttttttaacggaaatccggaaataatccttaccggacacgtccgataagctgtactggcggatatgcgtataacccgtgtccggaatgtatacttttacactgatatactgtcctgctttgaattcaggcagcggctgtccgtcttccggttttagataaaatgacgttatctctttgctttctcttacctttttatcaattttaaacggcttatagtctttccatccgcctttttgcgttgccgcttgttcatacatgtccttctcaattccgataaatgcgtctgcaattgcgccgtatgctttttcccacgcctgaatgacctcaggagtagccgcgtcctgtaacacatcctttatcgctattaacaaaaactttccaacgattgggtaatgctcgggcttaactccgatactccggtgtttatggctgatttgtttaacgacgggaattatgttttccaagcggtcaatattggcggcggctgcaatcacggcattcgataaggctgtacgctgggtttttttcttttgattcgtctgattaaaaatattcaacagctcagggtgatgctgaaacagcaggtcataaaatcgtcctgtgatttcttcaccatgctcttccaataccggcacggtgcttttaatgatcgcgattgttttttcatcgagcattctgaaatccccccaagatgtatgcatctcgattgactgaaaagaatcattttgaattcttttttatagatttccccggtcaaaaagaattaaccattccgatttgaagcgaattcaggaaaaccctgtagatactataaggataaaaacagcagataaatgcattataaaaaccaaacctgcggccctaaaaaatacggacttttctcagtgtacttgtccggtgcaaaatcctccttgtcagctatttagtacgggaggtgagataaatggggaaagaatcgaaagtgtattactgtgaccctaagtatgttgtggctgacacgtatactgacagcgaagcggtgtacgtccatcccatcaaacacattaacagagagcatatccgttatgctccccgtcacgtttatcattcatgagatcgttgatccgggcggtcctgggaaatgtgagtgtaaaaaaaataaaaaaagacacagatggtaattggctcgccttatctcaggttaaacacgcaagctaagcagacctccgtcttttcttgtgcctgataccgttgttatatacaaacaggcatgacgtatgagcaaaaaaatcgcagttctggtgacagaccaattcgaggatacaagcccggcagaagcagaaaaagaagtgaccggcaggcacggtgagaaagtaaaggtcgatcaagcgatctcagacgcagatgaattcgcagctgaacgcccggatggatttactaaagcatccgcaaagatttaataaataccggcacaaattttataaaggtgaagaagccggaagccatcatattttaacgagcagaaatgaatcgtgaatcattgaagctgctgaaataagcgaataaaaaatgcacagacagttcagtctgtgcattttttatggatatttaaactggacctattctctttaccatccaaaataagtaaaatagagagtgggtttttcaaaactcgacgggaggttcacttatgtggataatcattttgctgcttattattttaatcggctttaccggaaatattgtctcgcttttgagagcgcaacgacgcgcatctcaaagaattattgagcttttagaagaaaaaagccgaaaataaccttttcgtgctgtttcatccgtaatagtaataataatttcggcagatttcctgaaaaatgatttgatgccctgtctcgttcggatgaagaccttctgacatgcacattttgcggaaagcaggattatacgggtcaatgagatctgtatcaaacaggtcggcatacggtacagagaggagtgtgcaggcttctttttgggcttttacatagtccgccagcttcaggcccagtttatttttatcagtatcacggcggacgatttttccgtttgagattttcacctgccttgtcggggtcaccacaatgatgctgcagtctttatttctgcttcgcagctgctgaatgacctgacagaagcctccgtaaaatgtggtgatatccttttcatctgtgccgatgggaatatggccgcaccaatcatcatctgttccctgcacaataatgacatcatggcccgacgttttaagcgattgctgataaatgttatcggttccattgttgctcatattgacgccgctgacagacagattggttattgcagcgtttgtccggtctttcagaatgtcaccaaagccgtatttcgcacgcagcccccgggcgacgctgtcacctaagatcgcgattttcgaagccttccggagcctgcttatgctgatgaagtccacgctgacatgtccgctgtccgtgatatgtaactgcttgctgctgatgttctgcgaatataccgtttttccttcagattctttataaaaatcctcattcagcttcattcggtgtcatcccttcctttttatccttcggcatcatgttcagacatcaaaaacggacacgaacaaacagcgtcatgttgtcagttcagtgtccgcagatgatgatactggagtttttccagttctttctattgccattatagcagatcccggttctatacgcatttattgcacatcgtagtttttatagtcagcatttgaaacagcgcttgcgggaagagcggtgcttttgatgggaccgtcttgtgcgatgcgtacgacgtgtccggcgcgtccgtcttctgctgcgtgagcggtgtgaacggtgcgtccgtcttttgctgcgtgaacgatgtgaacggtgcgtccgtcttctgctgcgtgaacggcgcgtacattttccggcaaccggttcttggtgtaaatactcccctaaaccttctctttcagcaacggcaactccatgttcaatttctttaacagaaatagcgttcaattgtattcacctccctttttctttacaacaacttatgaaatgaacctttcacttgtataagcttctctctcatattggtgagaaatagtcatttacatatcaaaaaagccccgttttacacggggctctcagttaaagatcacgattatcgctgtcagaaacttgccggtgacaaaggcaagatcatttatttcttcctttcgctctccggctcaggatgaatcatcacctgtgcttgtttaaattcatccgtaatatccctttcaatgcggtcacacaagtcgtgcacgtctttaatcgtcacgtgagacgccacgaccatatgaaaatcaatatactcctgcgggcctgagcgccttgtacgaaaatcgtggatttcaataaattcctgatgaaatgtatcgataatctttaaaattgttttctcttcttcttctgacagacgggtatcaatcagcggcggaaatgcttctttcattaacttaaatgcttcatatatgatatacaccgcaagcaccatacctataatgggatcaagtatataccactccgttaatgtaacaaccaaaaggcttgccgctacgcctaatgatgtgtatacgtcagtcagtaagtgcagagcatttgatttcattgctacggaattaaccttttcagcttctctttttactaatttcgagacgatcaaattaatgagagcccctaaaagcatcacaataattcccaataccggcagatgaaccggctctggattcaccaatttttgaacgcattcatatatcatccaaatccctgccgcaaaaatcagaatcgtctcaatggttccggagagattctcgacttttccatgtccgtacggatgccctgtatcagccggcttttttgatatcctgacggaaataaaggcgatgaaggcggcgatcaaatctaaaaaagaatgaatggcttcggaaagtatcgcgacagaccctgttataatgcccaccgctattttgagcatgacgacaagagaattgcttataactgataaaaaagcgattttagaggtgttttccaccatgatcctcctcttttgacttcttgaatttatcgtatcaaacagcattcgtgtgggtctacggcaacgtttttcacaagagccatacaagtaactcgctctaaaataagttggaaagcgacaaaacagctgtgcctttcattcagcactcaagtcccattgacaacatataaccgcttaaattatagtagtttcatgaataaccactacggaggatgtttatggaggatgttctgaaagaattacaaaaatttggattttctcaatatgaatgcaaagcatatatcggcttgttaaaacactcgcctgttaccgggtacgaagtcagtaaaaggtcaggcgtcccccgctcaatgatctatgaagtattgggaaaattagttgataaaggcgctgtccatattgtgccgtctgatccggttacatatgccccgctggccggaaaggaattaattgaccggctgcggcacgatttcgaaagctccttcggctatcttgaggagaaattattggcgcttgaaagcgagcaggagatgaatgtcatcctccgcatcagcacaaatgatcatgtcatcaatgaattgaaggatatgattgaaaaagccgaggaagagttgtggctgtctgtctgggaacagcagattccctttattcaagaagccgctaacaaacgcgcggccgaaaaattgcccgtcttttcgattgtgttcggccctccggaagtaaagctcggaaatacgacacatcataatatgtcgcctgaagtggcggaaaaacgcatgggcgggagattaacgatagcggcacgcgataataaagaagtcttaatcgccaatttttctccgcagacgaatgcctgggccattaaatcagaagatcccgctcttgttctcgtggccatggaatatatgaggcacgaccttatgttcgcggagcttgtaaaagaagtaggggctgaaaaagttgaaggcctgatgaaacaaaaccattcgttatttcatgtcgtcaccggaaatcggttcatataaatgtgaaccgtattttctttgattttttcattagtcgttatcattataatctctaaggaaggagtataaaaaatgattaacacagaagtgcaaaaaaccgccgtttcccgggaaatgaacgatacatttttacagggggtccgggattgtgtgcctaccttgcttggctatatgagtatcggttttgcttttggcattgtcggcgtggcctcacatctcagtattcttgaaatttgtttgttatccgtgtttgtctatgccggcgccgcccaatttattatttgctcgctccttgtttccgggagtccgatttccgccattattttaacgacgtttatcgtcaatctgcggcaccttctgctcagtctgaccatcgcaccttatttcacgaaatactctttggtgaaaaatatcggcttcggtgctttgcttaccgacgaatctttcggggtagcggtaaacaaggcggctcagaacggcaggcttaacgataagtggatgaacggccttaatgtaacagcttatgtgtgctgggttatttcttgtgtgatgggcgggcttctcggacaatggatatctgatccttacgccctcggcctggacttcgctttgcccgctatgtttgcggcgctgctggtgctgcaattgcaggcgtctgcgtcggaaaagctgaagcacaatctttccttaatcgtctatatgatcatctttatggtcttgttatcctatatcgtgccgtcacatatcgcagtcatcgtctcaaccgtgattgtggcaaccatcggggtggtgacggacaaatgagcatcagtacgcaaatgatctggattatactcggctgcatgattgttacacttgtgccgcgtatcgttccgtttatatttgtccggaacattcagatgcctgaattggctttaaaatggctctcctttattccgctctgcattttgaccgctctggtaacggagagcatgatcgtgaaaacaaatagcgctttgacctttgattggaaagcaatgatcgttctcatcccgacattgctttgcgcgatgtggacaaaaagcttatcaattacggtcatcacgggagtcgtgctgatggccgccgtcaggctgatctggtgacaaataaaagcctccattccgcagaatgaaggctttttcctttatgatggcggattttcttcttccgcctcaggttcctcggctttgacttcggcgttcatgctttgctgctgttcccaatgatcccgctgcaatctttccttcgcgatggtgaacatgaaattcacggcgcagcgccccttccctgttttgccttatactatgtactgtactcatttcccggtgcagtattcacaaaacctaaaaaagcagcctgccgcataaagcggccggactgctttttattttcagtacgtgatcaggaagtattttttctttccgcggcgcagtacggtaaattgatcttcgatgcggtcttctgctgtcagaagatggctgatgtccgtctggcgctcgccgttaatgtagacggccccgttttgaatgtcttcgcgggcctgccgttttgaaggcgacaatttagattccacaagcacgtctactaaagacagctcttcagagcggtctttttcaaacgaaggcacgtctttaaaccctaccttgacgtcttgagcggaaagctctttaatattgccgctgaaaagcgcctgggagatatgaacggcctgctccagcgcttcgcggccgtgtacaagaacagtcacttcttcagcgagacgtttctgcgcttcccttttctcaggagccgtctccgttttttcagcataagcttcaatttcctcttttgacaggaaagtaaagtattttaaatatttgacgacgtcgcggtcatctgtattgatccagaattggtagaattcatacggcgatgttttttctttatcaagccaaatcgcgccgccttccgttttgccgaatttcgtgccgtccgcttttgtgacgagcggaatggtaagaccgaacgctttcgccccttcttcttccgattttctgatcagttcaagaccggccgtgatgttgccccactggtcactgccgccgatttggagtttgcagttcttttctctgtacagattcaggaaatcgtaggattgcaggatcatgtagctgaattccgtgtaagaaatcccggtttcaattcttgagcttacagtatctttcgcaagcatgtagttgattccgaagttttttccgacgtcgcgaagaaattcaatgatgctcatttttccgatccaatcaaagttgttcgctatgacagcggggttttctccggcttcgaaatctaaaaatcgggaaagctgatttttaattttttgcgaccattcgacaacgatatcctgagtgtttaacgtacgttccgcttttttgccgctcggatcgccgatcagtcccgttgcgccgcctacaagcgcaatcggatggtggcctgcaagctggaaacggcgcagtgtcaatatcggcagaaggtgtccgatgtggaggctgtcagccgtcgggtcaaaccctgagtataaacggattttttcttcgttcagctgtttattcagtccttcttcatccgtcatttgctggattaagccgcggaatgataaatcttctaataaattagtcattttgtcttctcctttgtttatagaaataaaaaacgccccttcgtttaaaacgaagggacgatataatcgcggtaccaccctactaataaaagcctaaaaaagctcttatcactcttcctgataacggaccgtgtccgttctttcactactgaaagccttcctttgaagtactttgttcgcaaaagcggttcatgagtgtattcggcatatcttatgtactgattttcaccggccatcagctctctggaacaatcagatatcctacttgtctcaatcaaaaccttttcgtatgaagcttactcatttttaacataaattagatgcaatgtcaacgccggctttaatcttccattgtggacaggtcgcctgccggcaggttcagctcccacgccttcaggacacgtcgcatgatttttccgcttcgtgttttcggcagtttatctttgaactcaatttcacgcggtgcggcatgcgcggcaagcccttgttttacaaagaggcgaatgtcctccttcagctgatcggatggttcatgtccttctctgagggcgataaacgctttaatgatttctccccggacaggatccggctttccgatgacaccggcttcggcaatcgccggatgttcaacaagtttgctttcgacttcaaacgggccgacacgctcgccggatgtcataataacatcatcgactctgccttggaaccagaaataaccgtcttcatccatataagctgaatctccggaaacataccagccgcccggcatgaaataagaatcatatttttctttgttattccaaatggaatccatcatggacggccagccctttttaatggcgaggttccccatccggtacggcggaagttcatttccttgattgtcaacgatcgccgcttccactcccggaatcggtttccccattgaacccggcttgatctccatgcaaggataattgcagataagctgtccgccggtttccgtcatccaccacgtatcatggatgcgcttgccgaatactttatgcccccacttgatgacctcagggtttaaaggctctccgacactcaggacgtgacgaagtgaggtaaggtcaaatttggacgccatttcatctccggcgcccataagcattctgaaagcggtcggagcgctgtaccagacgctgacaccgagcttttcaattgtgccgtaccagttttccggactgaatctgccgccgacgattacgttcgccgctccgttcagccacggcgcaaaaatcccgtacaccgtcccggtcacccaacctgggtccgcagtgcaccagtaaatatcgtcttctttgagatcaagcacccacttgccggtctggtattgctgaatcatggcttcatgaacgtgaagcacgcccttaggcgttccggtagaacctgatgtgtaatgaagcaggtagccgtctcttctgtccatccattcaatgtcaagtctcgtgctttccccttcagccgctttatcgtaatggatgattttatctcccgtttcttcgctgccgccgacaatgaaaatatgctgcaggtcggggagactctctgccggaatccgttcggccagctcaggtgttgtcacgacaacctttgcctggctgttcagcagacggtctttgacggcgccttccataaacgcttcaaataaaggaccggcaatcgcaccgattttaatagcgccgagcatgataaaatacagctccggcgaacgaggcatgaaaataaaaacgcggtctcctttttccacgtttccataccgtctcagcacatttcccgcccggttcgattcctccatcatttctttaaatgtgtatttttcttctctgtttgcgtccttgtaatacagcgctactttgtttctgcgaaatgactcggcatggcggtcaatcgcttcgtatgcggcattcagcttcccggtctgatgccaggaaaactcggcctctgcttctttccaatcgaagctgcggtatgtttcctcataattttgcagatgataattccccttttctgctggcaacgctttcaagttcatgcaacatccccctttgctgatctatagactaattatagtagaagttcacagttttctcaatttttaaaatataaattactgtactattgaaaacgctttataatttgttatgcttaaaggagatgtgtttttattaagaaccgacaggcggtgaatcagtgaaacatcataaaacgtaccattctacatctattcagacagcagccggccctcttttagtagaagggcccgttcctccagaggacttagcacagtatgagtttcatgaaggcctgacagcctttcgccttcctcatgaacagcacaaagcgttaatcgagatagccgggcttcccgaagggcggatcattatcgccagggacggacagacgattatcggctatgtgacgtatttatatcccgatccgcttgaacggtggtctgacggaaatatggaagacctccttgaactcggggcgatcgaggtcgctcccggctacaggggctgttctgtcggaaaaactttgctgacagtcagcatgatggatgaacagatggaacattacatcatcatgacgacggaatattactggcattgggatttaaaaggaatgaaaaaagacgtgtgggaatacagaaagattatggaaaagatgatgaatgccgggggtcttgtctggtttgcaacggatgaaccggaaatcagctctcatccggccaattgtctgatggcccgcatcggcaggcacgtcagtcaggagtcaatcgaacagttcgacagacttcgtttttatcagcgatttatgtattgactgacatacaaaggggataaaaaaatgattgcagaacaaatcatgaagcgggatgtcatcaccgtcacaaaaaacgactccattgaaacagccgtacgcaaaatgaaggcctatcatatccgtcatctccctgtcaccgacgaagacctgcacgtcgccggtatcgtcacagacagggacattaaacaggccggcccggacagcagctttgaacaagaagaccgcggcgcgtttctgacaaacaaagtggaaaccattatgaaacggaatgtcatctgcgcccatccgcttgatttcgtggaagaaatatccgcttctttttatgagcatggcatcggctgtctgccgatcacggtaaacaataagctgacaggcattttaaccaaaaccgatgtacttcggactttcgtcagcctgacaggcgcagcccagccgggatcacaggtggaaatcctggtgacggatatgacccaaagccttgctgatctcagctgcatgtgccgtgatcttcagctgcaaatcctgagtgtgctcgtctatccccatgattcagccggctcgaatatactcgtctttcgggtgaagacgatgaatccgctccctttcatccatgccgttcatgaggccggatacaatgtcttgtggccgaaacatttgagggatcagtcatgagagacagcgtttttgtttactcgccttcttatcagacatatcaatttcaccaggaacatccgttcaatcagcagcgcgtgcttttgacatacgatctgcttcaggcggcggacgcgtttgaagagggagatatcgtcgctccccgcacggcctctaaagaagagctggctctcgttcatacggaggattacatacaggctgtggaactggcgggtgcgggccggctccctgccaaagaaggagaaagctacgggctcggaacggaagacacccccgtttttgccggcatgcatgaagccgcatcgcttcttgtgggcggcaccttaacagcggccgattatgtcatgacgggacaagcaaggcatgcctgcaatttaggaggcggccttcaccacggctttcgcggcagggcatcgggcttttgtatctataatgacagcgccgtggccatccaatacattcagaaaaactacggggcaaaggtgttatacattgataccgacgcccatcatggcgacggcgttcaatttacattttacgacaggtctgatgtctgcactgtgtcttttcatgaaaccgggcgttatttatttcccgggacgggacaggtactggaaaaaggaagcggccaaggctacggctattcttttaacatcccgctggacgccttcacagaggatgattcctttcttcacgcttacaaaacggccgcctcggaaatcgcggctttttttaagccggatgtgattctgactcagaacggagcagatgcccattattacgatccattgacacacctgtccaataccatctccatttatcaagagatcccgcggctcgctcactcattggcccatcaatattgcggcggcagatggatcgcggtcggcggcggcgggtacgatatttggagagtcgtcccgagagcatggagccgcatatggcttgagatgaaagggattgatcccggggagcgcataccgcagaagtggattcaaaaatggcagaaacactctccctataccttgcccgctttttggagtgatcctgaccaattatatcctccgattccccgaaaagaagaaatctcagaaaaaaatgcccaaaccgtggaaaaagcgctttttgccatccggtctgagcagcggtataaaacaaaataaaaaacgaccttacgaggaggtcgttttttttatgacaatttctacacggcggttttctttcatatgtctgatgcttttgttgtccttcacaggtttcgtatccgcgtaaccgacagaaataaaccgtttggcggaaaagtcttcttttgcggtaaaataacggatcacactcgccgctcttgcagatgacagctcccagttcgacggaaattgataggtggaaatccggcggctgtccgtatggccttcaacctgtatggcattcggaagtgttttcaaaagcaccgcgatctgatgcaggactggctcagcgtttttcagcacatccgcttttccagtctgaaacagaacggcctcctgcagcacaagaaccactccgcgctcatcgcgcttcgccgtcattttggaacttaaatggtacgtttttatgtatgtcttcacgttctgcaacagcaaatcctgttcactattttcgtttgctttgcttgatgacgctggttcacccccgctgccgtttgtatgaatcgaagtaacggctgattgaaatttttccgcgtctatttgcgacatcgaaaaaagcaatataaagaacacgagaataagcgtgatcaagtcggcaaacgtcaccatccatcttggtgaacctcctgtatttcccggtttgttccttcgttcaaaacgctcttttctaagcttcatggacagcgccctttttcttgttcgaaggctgtcctttacgccagtcttctcttgagctgaaaacgacgagctgactttcgagattgcggggattttttcccgattggatgccgacaacaccttcgatgataacctgcttgatgaaaatttcactttcggttttttcttcaagctttgccgcgatagggataaacaccaaattggcaagcagcgccccgtacagcgtcgtcaatagcgcaatagccatattcggcccgagtgtatgcgggtcatttaagtttttaagcatgagcacgagtccgacaagcgtcccgatcattccccaggcgggcgcaaaatcaccggctttttcaaaaacgcgtctgccttttctgtgcctttcttccatcgcggcgatctctgaatccatcaccagccggatcgtttcctcgtcccagccgtctatcgcaagcaataaccctttttttaaaaacgggtctttgatttcacgcgcctgatcctccagagacagcagcccttgcctgcgcgcctgctccgcaaggctgacgaatactctgacaagctccttcacattatcatcctgacgggagaatacctgttttaaaacagatggggttttctttaaatcccgcggcggaaaactgataaacaccgctgcggcaaggccgcctgttacgattaaaaaagaagtcagatctaaaaatgagctgattcccgccagtcccgttcctgacagaattccgattgcgacaataatacagcctaacataaatccaacgggtgtcagataatcaaaacgtttcatatcttctccttatcaagtaaaaaagcaagattccactcaggcagagtgaagcttgcttttccgtttttcttatgacttggttgattgtcttaattcgatgcggtgaggcaattcaacgatatgctcttcaaccggctctttgttcatcagttttgtcaaaagtctcatcgccacggcgccgatatcgtacgtaggctgcacgactgttgaaagctgagggcggaccatcaggctcaatctcgtattgtcaaaaccgataatgtcaagatcgtcaggaatcgacataccctgatcctgggccgcatgaataatgccgagagccatttcatccgtcgcagaaaggatcgccgtcggtttccggtcaaggcccatcaagctttgaagcgcctccatcccggaatcataggtgtaatcgccttccgccacgaactgctcgttaaacgcaatgcccgcttcttcaagcgcccgtttgtacccttgcagttttttcgaacggttgatcggctctgccatcggtccggagacaaatgcgatatcgcgatgccccttatcaatgaaaagcttgacggcatcataaatcgcctgttcataatcaatggcgacagaaggcgtctcgccctgttcttcaactgacgcagccaatacgatcggaacgggagagcgcttaaattcttcgacatgctcgtccgtaatgttgccgcccataaatacgataccgtctacttgtttaccgagcatcgtatttaacaggtgcagttccttctcgagattttggtctgaattgcttaaaataatattatatttgtacatcgtcgcgatatcttcaattccccgcgcaagttccgcgtaaaaaatacttgagatatcagggatgatgacgccgaccgtagtcgtttttttgcttgccagtcctcttgccaccgcgttcgggcggtagccgaggcggtcaatggcttccaatactttttttctggtcgtcggttttacattcggattgccgtttacgacgcgggaaacagtcgccatgctgacatttgcttctctggccacatcgtatatcgtaatgttgctcactgaaaccactccttttactggatacacttatccttatctatagcataaacactttatgtaaagaaatgtcgtacgttttcgcattctgtcgtttatggttgtaagcgtaagtcagtagtgtacattatttttcattattcatcaaatttaaatacttctcatgaaattatacacgtttttcccaatgatgaaaacgttcactttcattttataattaaataaaatgaagaaacgaaaaaaggccgcacacggcggccttaaagagcggaacactgtattatgcttttactttcatcatcggctttaattcgttcagccatttctcgaattcaggaatatccatctgctgcgcagagtctgaaagggcaacggaaggatcagggtgaacttcagccataacgccgtcagcgccgatcgcaagcgccgcttttgctgtcggaagcaggagatcgcggcggcctgttgaatgtgttacgtcaacaaacaccggcaagtgagtttcctgcttcaaaatcggcacggcagaaatgtcgagtgtatttctcgttgctgtttcgtacgttctgattccgcgctcacaaagaatgatttggtcgtttccttgtgacatgatgtattcagctgcattgatgaattctgaaatcgttgcggcaagaccgcgttttaacaataccggctttttaacggaaccggcggctttcagcaattcaaagttttgcatgttccgtgcgccgatctgaatgacgtcaatgtaatcaatcgcttgctcaatgtgggcaggcgttacgatttcactgatcaccgcgaggtcatattcatcagcgacgcgtttgagaatttgcaggccttctacgccgagaccttggaaatcatacgggcttgtgcggggtttgaacgcgcctccgcgcaggattttaatgccttgttttttcgctgcggcagctacttccgcaacctgctcatagctttctacggcacaaggtccgacgatgaatctctgatcgccgtcaccgactttttcgcctttaatatcaacgattgtatcttctgcttttttcttccgggagacgagcaacgctttgctgtgatcctcttcttgaagctcgaggccggctttgaaaatttctttgaaaatatgctggattgttgagttttcaaatgggccgtcattgctctcaataatgcggttaagcattgtacgctctctgacagggtcaaatcggttgacaccctgtgcttcttttgctttaccgatttcttttacaacggctccgcgttcattgattaatttaaggatttctaagtttagtgcgtctgcctgctgtcttaggttctctaattccttgttgctcatctttttcatcccttctatgctatgttttattttaatagttaacatgcatcttactacagttatgcgaaaataggaatatgaaataataaattttttcacattctgctttatcacaaaaacgcttttaagcttttatgcgttgaagtaacgtataatgttatcctacatgatatgtctgaaatgatcaatagtttttttcaaaaaaaaaccgccggtattatccggcggcaagcaattatgaaagatgctgttctattgcgttttttgtaatttgtgaatgagacgcgtgccatttcacttcgccgtttgtaatgacgaatacttgcgggctttcatgtttcacgccgtaggtctcggcgatatagtttgaaagcggccggctgtcctgcacctgcaggtaataagaaggcacttctgtatgctccgatgcaaaggcgtcaaactcttgaaacgccgcttggctgatcgggcaggttgtgctgtgtttcaaaaacacgagcgtattttctttctcagcggcatttttgaactcttcttctgacgatatcagctgcttagtcatgtcggttatctctccttattgaagatcagcgatttgcctgaccggctgtttccgcggcttcttccgcttcgttcttgatgctttgagccgtatcctgcatttcgcttctcgtctcttcggctttctcagttagtgtgctcttagaacggtcttttaaatccttcactttattcataatctggcctgactgatcagctaccagctgggtgatgttagatgttttgtctttggcgatgctgacatattgagagcctttttctttcgcgtcggccgtcattctgtccgtcttatcctttaatgcagaggcctggctgccgagatcgtcgcgcagctccttgcctgatttaggcgccagaaacaaagctgttgtcgcgccgataattcccccgatcagcgttccgattaaaaaatccttactattgattccatctttgctcattatgattcctccttagtggatttttcttatgattaaagcgatgtttttttcttttgcttccacttgtcccatatttccatagccgcctggctccaggtgacaacctgactgatcttgtcctggttctctcttacagaggccgaaacggaaccggctgcctgctttatggatgtattaaactgctggacggaagttcccacttcctgcacagcatggacaaccgtatttaatttctctgatttttcctgaatatcctccgcgagacggtttgtcttatgtaacagctcggcggtctctgcggtgatgcccttcatctgcccttcaaggccgtttaaagtcgacgcaacgtttgttaaggtcatctgcacagactttaatgttttggacagataaatgacgaggataagaaatgctacggcaatgagtgcgacgcttaagtaaagaatgataatcatctaatacctccttattgcaggatataatggtatatacccaattatgaaaatgataaacatatatgaaaggggctgtctgtatactatttctccgtttatcggaaaatccctttacagcacgcgcaaaaaagcagtgagagccccactgcttttttgttacgctatgacgttttcataagctctcatatatttttgaatgtctccggcgcccataaagatcagcactgcgttttcatgcgcttttaacacggatgtgtcattctcttcaatgagttctgcgttatcgattttttcctgcagatccgtgatggtgagctttccgacgttctcgcgggctgagccgaaaatgtcgcacagatatacgcgatcggcggcgcttaagctttctgcgaattcatcaaggaaagattgcgtccgtgtaaacgtatgcggctggaataccgcgatgatttcacgttcaggatatttttgacgggccgcctcaatcgtgactttaatttcagtcggatggtgggcgtagtcgtctatcagcacctggctgccgatcactttttcattgaatctgcgtttgacgccgccgaatgattcaagtccgagcttaatcatgttcacgtctatctcttcatagtggcagagcgcaatgaccgctaatgaattgaggacattgtgatggccgtatgccgggatgtagaacgtatcgtaaaacgtattgcggacaaagacgtcaaatgtcgtgccttcggtattttttacgatgtttctcgcttgaaaatcgttttcttctcccgtgccgtaataaacgacaggcacattggcgtgaattttcggcaggtactcgtcatcaccgcaggcaatgatgcctttgttgacttgaagcgccatgttttggaaagcatcaaacacatcgtcaatgttggcgaaataatcagggtggtcaaaatcaatattcgtcatgatcgcataatcaggctgatagcttaagaaatgacggcggtactcgcaggcttcaaatacaaagtattcgctgctttcatttcctttgcccgttccgtccccgataagaaacgaagtcggcttcgcttgctgcatcacgtgtgctaagaggcccgttgtggacgtctttccgtgtgcgcccgttaccgcgacacttgtatattttttcatgtattcagctaaaaatttatgatatctgataacaggaatcccctcagcaagcgcctttgcgatttccggatgagaatcagggaatgcgtttccggcgattaccgttaagccgggtttgatgttatcggcgctgaacggatagatcgggatatttcttttttcaagggcagcctgagtaaaaatctgcttctcgatatccgatccctgcacctgatatcctgtatcatgcaagatttgagcaagcgggctcatacctgtcccttttattccaacaaaatgataaacagtcataatcgtacctccaacaaacgtctatctgttccccagtatatgacgctcatttcattttgcgaccgccgcgggcaaaaagcccaaacagcggcgcttccatttatttttacgttatcgtcagtatctgtaactttctttttgattaaacctgccgcatgatatttcagcgcgtgacagtgatgcagtttgatggtccatccactatcataccatgtttgtgagaaaaatgaacgatattcttattcttgagaaatgtcagcggccgtaatcagcacttcgcggggtttgctgcccttcgcttctgagatcatgccttcagcctccatcatgtcaatcagcctcgcggcgcgattatagccgattctgaaccttctttgaaggcttgaggtgctggcgctgttttgttccacgacgaattgacacgcctcaggaaacagctcgtcctcttccttgagggcggttccctgcctgatcagttcttcctgttcaaacaaataagaaggcggcagctgctttctgacatgggagacgacgcggtcaatctctctgtcggacacaaagttgccctgcaggcgcaccggttttccggtgccgttttcccagtagagcatgtcgccttttccgagaagcttttccgctcccgccatgtcgataatcgttctggaatctacctggcttgagacggagaatgcaatcctcgtcggtatgttcgctttgatcattccggtaatgacatcgacagacggacgctgtgtcgcgacaagcagatgaatgccgcaggctctcgctttctgcgcgattctggcaatgctttcttccacatcgttcggcgccaccatcattaaatcagcaagctcatcaatgaccacaacaaggtaagggagcttttcgccggtcttatgatcggccgttaattcattaaagcggccgatatctcttacacccgaatgggcaaacagttcataccgccgttccatctcttccacaacccattttaatgcggcggtcgcggctttggcgtctgtgatgacggggctgaccaaatgcggaatttggttataaggcgcaagctccaccattttcggatcaatcagaagcactttgacatcgctcggatccgccttataaagcagacttaccaaaatggtattgatgcagacgctttttcccgatcccgtggcacccgcaatcaatccgtgcggcatctttttcaaatcaatgacgaccgggtttccggaaatatcgacgccgagcgcggctgtaagcggagacggattctccctgaaagcggcgcttctgatcatctgccgtaaatcgacgaccttgcttacgcggttcggaacttcaatgccgatcgtgtttttaccggggatcggcgcctcaatccgaatatccttggcagataaactcagttttatatcatctgctaaatttgtaattttgttcactttcactccgggctcaggatgcacttcaaatcgtgtgacagatgggccttgtgtgacatgaacgacttgggcgcgcacattaaagtttttcagcgtaacgtttaaaagctcgcgctgtccttcaatccatgattggtcgtcctgtctttgcgccggcggcacgtccagaagcgacagattaggaaagacatagcccgcaccgccttctggcgtcttcgtctgcttgtgtttatcgcttttaagcatcatgacgttaaacggcacattacgctctctcggccgatccgctcttctcgcaggctgtgcggtgtgatcggttttttcttcagcaggccgggccggggcatcggccgtctcaatgtttacaggctcaagctccggttctgattgctgaggggcatcattgtactcaggctgaggatctgcttcctgtttcacgtcagcttcaggcaattcaggccggtcttcagactgcggctgaacttcttcttgttcttctgagtatgtatacaccggttcttccgcggtttcaaaaggccgggctttttccggctcaggctgctgatactcctcctgcggcggcgcttggtcttctgtgtgttcagccggcaggggtgcttcatactcaggttcttttatagatggctcggtttgttcatgctcttgttcttccggatagccggcaggcaccgcgctttccgtttgctgcgagtcttcagactgcggcggttcggacgctctgtacacctgctcttccgcttcagtctcagagtgcagctgctcttgtttggcggccgggtattcgtccgtttcctgtttcgttaacggttccggccgggtatttgtctgtttagttaggccggatgctgtgaatacgggctctttttccgtttcctgaccggactttggcggatcaaactgctcctctgacagcaatgttacgctctcttcacgctgtttttggggattaggcgcttttttaatgctgtgctgagattgaaagccgtagaccggtgaaggaatggatgacggtttaaagggctttttcaccgtatccggctctttatatgtatgctctttcctttccgtatgctccttcgcggcggcataaccccgtgaaggctggcggcggcgttcgtgcctttcctgctgtctttgttccgtccgcttatagccgtccggaacgacagggaagcggaaattccctttcggatattcataatatattttaggatcttccatgcgcgttaatttgccttctggctgatccggtatatgctctttcgggacttgtgcatgcgtgttcggttcaagttcatgctcttcttctttttcacctaaaaataagtcaaaaaatttattcagccaactcatgtttaatcactctctaactccctttttagtagtctgggacgatatttagtataccattgccgggcggctcagaaaagattaagctcccaacagaagaaagccgttaagcagacatgcttaacggctttccctcacatcattcgattctgtgcgcttatttatgggagttagaattgaaatgcttcgccggcctcgcggctgtcttcaagaacaagaatgcctttttcctgcggcgcatccggcaaagcgagttctttcgcggagcagatcatgccgcttgacggaacgcctcttagttcagcgtctttaatcacaagcccgctcggcatcaccgcgccgactttagcgacgacgactttctgtcctttgtccacgttcggagcgccgcaaacgatttgaagggtttcttctcccacattcacttggcagatgttcagtttatccgcattcggatgtttttctttcgattctacgtgaccgacaacaaatttcggagaaaggtcaaccgtcagtgtttctgaaacgccgtttctgttcagtatttcattcacgtcctgaacgaatgtctcagacaaagcgacggggccgttgtcttcaatctgtaaataagaagacacgttaaaaatgttaaagcccgtcgtttcttttgtttctttgttaaagattcttgcgacatcgccttctctttcatagctgatttcttcgcgtgctgcatctttaagagagatcagaagcgtatctcccacaccttctttattgtaaaaagcgttcataagaaaaatcctttctaatcctttttcggccggcttttcgccatgataaacacaggttccagtctgccttcattgtacagaaatgaaagggccgtaatcggcaccgtgccgcttgcaaagaagctcatggacatttgccctaaaatatcataacccgattcatttcgaatgtcagcaagtattaatacatcctgatgcgggacagaaatcgctaattcaccttcagcggcctgcttgtattcatgaagaatcgaatcattgagaatccggctggcgtcatagccgtcattcgccctgaaaaaataaaaataattgcccgcaaccgtatcctttttgacgacggaagggagagagcggagattgaatgacgccgtctccctgatccgttcttttgtccagttttctttctcaagcatccggctgtcaattaagcggtacgttttgccgaggtcaagcgcgtagtagattctggtttcggccgtatggtcatcatacacgagcggaatgccgtcgcccgtttgatcgggaaatgatgtggagcggatcaccggatagattccggcttcctttccggtcatctcctgtccgctgccgcccatcgcctccatcgcttctgacacatagtagacgatctcgtcgatcgcttcttctttttttgtctcccacttggcgatgatcggcgggagctccaatgtaatgccttttttagtcgtttgatcctcaacacggagggtgtctttttctctgtcaaaaaagaaggatcggttctcgtgctgcaggcgctgttttaatagatccgacagcttccttgacgtcattttcaaagcctgtggcctcctttacgctttagcgagggaatcggttaaaaattgctcaatttcctctttcgttttgcggtctttgctgacgaagcggttcacttcttttcctccgttaaacaccacaaagctcggaatgccgtagatttcccattccgcgcatgtatcaataaactgatcgcggtctacgtagtaatacgtgaattcaggatagtccgcttccagctcagggagaaacggctccacaaagcggcagtccgggcaccaatccgctgaaaacataaataccgcccaatcgtcctgtaccgctttttgcaattcttccgtgctttcaatttttttcattgtgattcctccatttggattttgagttttttgtatgctgagtccaattggatcataccagactgcttacagcaagaccaactatatgcaatatcattatcatatttcatttgcattatcaagtaagtttcgtttaccattttgtttatagccgtacgaaaatctgaatatgtataaaaggaggagcaaaagatgcagtttgtcgtgtacttagccggtgaaatccacagcaattggcgggacgagatcaagaacaaagcaaaagcgctgcacctgccgattacatttgttggcccgatggaaaaccacgagcgctcagacaatatcggagaagagattatgggcgagcagcctgattctgttttaaaagacgccagagcttctgatatcaacaatttccgtacagaggtgctgatggaaaaagccgattttgtgatcgccctgtttggcgagaaatataaacagtggaataccgcgatggatgcttcttatgccatcgcaaaaggaaagccgctcattcttatccgcccgaaagagctgcatcatcctctgaaagagctttccggaaaagcgaatataacggtggaaaccgtaaatcaagcgatgaaagcactctcttatttatttgaaacagaataagcaggccgcctttatgagggcctgcttatttttttacacattttctctgatcgtttcgaccgtctgtttgtcactcgccatgaccagcttaatgagcatttctttcgccgcggcataatcgtcgacatggatgatggcggcatttgtatggatgtatcttgaacaaatgccgatgacggcagacggaaccccgctgtttgaaatgtggacccttccggcatccgttcccccgcctgaagcgaagtattgataagggatattatgcgtttccgccatatcaaggacgaactctctcatcccgcggtgcatgaccgtcgttctgtcgagaatgcggagcagcactccctcgccgagacggccaaacagctccttatcgccgctcatatcatttgccgggctggcatcaagtgcgaagaagagatcaggctgaatcatgttggctgctgtctgcgcccctctcaagccgacttcctcctgaacggtggctccggcgtacaggttgttcggcagctcttttccgtgcagctcttttaataattcaatgcttaatccgcagccgtagcggttatcccacgctttggacaatattttcttctcattggccataggagtaaacgggcataccggcacgacctgctgacccggtctgatccccattctgaccgcgtcctctttatcatcggtaccgatatcaatcatcatatttttgatctccatcggcttggcgcgctgggcatccgttaaaatgtggggcgggatgctagaaatgacgccgatgacaggtccgttatccgtctgcacctcgacgcgctgggcaagaagcacctgactccaccagccgccgagcgtctgaaatctcagcatgccgttatccgtaatctgcgtcaccataaatccgacttcatccatatggccggctaccataacggtgggcgcatcttcagcgccccgccttacgccgaaaacacttccgagtctgtcctgcacgatgtcatccgcatatttcgcaagctcccgtttcataaaggagcggacctggtgttcatttcccggtgcgccgggaagctgcgtcagcgtccggaaaagcgttttcgtttcctcattcatattttcccctcatttctatgtagtgcttttattttattagaaaaacaaccgttttccaagttctcaaattgaatgggctgtaaaaccgccgctttacttaacaccgtctggcatcttctgtataataaaaactacgacataattggaggtgcttcatattgaaattacgtcattttctcttaggtgcgggagtcggattatgcgctgccatcgcagtgaaaaagtatgcaatgaaaccttatatctcttcagaaaaagcgctgcgcatcgtgaaagcggcttttaaacagcgcgggccgatagatggatcatggatatacacagagcccgagccttaccaggtaaacggagaaaccatccaggtatacaaaactggcgtgacacgttcggcatttggcgagctggagcaatatgaagttatggtcaatgcaaaaacaggccagattgtcgatgtcattgattctgtcgcctcataattcggacaagcaaaaaataaagcccaaaaccatcagcgttttgggctttattcggttacatcggccgaatccgtttgtatacagggtgccacatcgcgtcttgcaccgtttggatcagatcctcgggttccgtttccgctacaccgtcctgaatggccgctttcgctacggctaccgctactgttgctgataccgtcctgagatcctccactttcgggagcatcggcgcccccggcttgccgacgtcgaccataccggcaatggcattcgcgcaggcaacgaacatattgtccgtaatcagccttgctttcgtcacaatcgtgccgagcccgagtcccgggaatacgagcgcgttgttcgcctgtccgatatggtaggtaacgccgttatacgcaacaggagggaacggactccccgttgtgacaagcgcacggccttctgtccattttattaaatcttctggttttgcttctgataaagtggtcggatttgacatcggcaaaatagcgggccgcttgacatgagaggccatttctttgacgatttcttccgtaaatgcgcctgatacagtggacgtgccgatcagaatcgtcggcttcgcctggcgcaccgtctccgccagatcaattgatccgccttcaccgctgcggctgtactctttcacttcatcagcaggccgggcgtacggaacctgaaaatcacgcaaatccttcatgtcatccgttaacagtccgtttctgtcgatacaccaaaaatggctgtatgattcttcttggcttaatccgtcatgcaccattgcttcacggagctgctcagcaattccgatgccggccgttcccgcgccgaagacaacgactttatgttcttttaaaggcacttttgatgcttttgcgcaggctaacactgctgcaagcgacaccgcgcccgttccttgaatgtcatcgttaaacgtacagactttatctttataccgttttaatatgccgcgggcgttagccgtaccgaaatcctcccaatgaagcagcgcattcgggaacgtttcccgcgcaagcgagacatattcatcaataaaacggtcatatttctcgccgcggactcttgaatgctggtttccgacatacagcgggtcatttaaaagactttcttgatttgtcccggcatctaatacgaccgcaagcactcttgacgggtcaattcccgccgctgccgtatacacagcgagttttccgacagaaatggcgatgccgccgacaccccagtcaccgattcccaaaatgccctcggcatccgtcgcaacgattaaatcaatattttcattttttccgaactgctgaaatgcagtgcgcattccctcaggatcatctattgataaatacagaccgcggggttttctgtactcatggctgtaacgctggatcgctgtgccgacggtcggcgtatatacaatcggcagcatttcgcctaaatgatcatttagcagcctgtaaaataacgtttcattccggtcatggagagcggtcaagtacacatttttgctcagctcatcaggctgcgaactgaactgttcgtaagcccgtctcgcctgctcttcgattgtcaatattttcggcggcagaaatccctcgagtccgagttcttttctttcctcctgtgtaaaggccacccctttatttaaaaagggcgtagaaagcaattctaagccgcgcagggttgttttgatttctccatctttcgtcacttgaaattgattcacctgtctcttcctttcaaagcaatttgtcttaggtttgcttttattcccgaaattcatacaggtaaatcatttggcccgcttattttttctcccgcttgacagacgcagccacttcaccgtcttcgccccattttaccgctctgtaaatcgcgtcgtgatagaaaatcagccaggcgtctttctccgctgcgaacgtctgccatttctgcttttgcggaatcgaggtcatcggataatcatcatacgccagcacccataacggatttttatgagcgtttgtcggcatcaggtcggcaaaatgcacagccgtttcccctccgtcttctaagacaattacgctgtgtccgttactgtggccgccggtgtggtgcatcgtaatgccttctgtcagctgatacccgttatcaaaggtttcgacctgatcttgtaccgcctcccaattttctctccaatatgtatttttcgatctgatattagggtttctcatttcgtgccactctgtcgcagaagtgataatacgggcattcggaaaaacagagacaagctcatctccgctgtattccgtcagaccgcatgcatggtcaaaatgaagatgggtcatcgccgcaatatgaatatcctcacaggaaagccccagctcactgagagattttttcagattggattcctgtgttacgccgtaatttcttttctgcttatcggagaatttcccactgccgatacccgcgtcaaccaatatattcaggccgttttttctgatgagaatcggatctgttcttaattcaatctggttcttgtcatttacggggtattttctcgaccataaaggcttcgggacaacgccgaacatcgctcccccgtccatatgcgtcacaccgccgtccagccacgttaatgaaatattcccaatattcaatgtctccatcttcatccctcctgatgtaatggtagcaaatggcggcataaaaaaacagactcccgcatcagagtctgtcttttgttctccatttggcttccgcccggtaaatcggctggccgagcgcggagaatttttcttcgtattctgtcataatattgcccttcggatcgctgttgtgcagatcgagactgacatccgtcaggagcaggccgtattcggaaaagctcttcagggagtattcaaatagaccgcggttatcggttttgaaatgaatctcacctgtttcgcccattacttcttcgtattttttcaagaacgttttaaacgttaaacggcgtttttcatgacggtttttcggccaagggtcagaaaagtttaaatatacgcgtttgatttctccccgttcaaatacatcattcagtgtttccgcgtctatatttaacaagcggacattgtgagctccgctgtcctttactttttggacggcagtgacgatgacgcttttaaacagttcgataccgatatagttgatatccggattctgcttggccattcctgaaatgaactgcccttttcccgtaccgacttcaatatggatcgggttgtcattgccaaagaccgtgttccaccgccctttatactgagccggatcactgatggcgatgtcagcgttttctgccagaaaatcattcgcccaaggtttatggcgcattctcatatgattgacacctctatctataatttcgagtaacaacataccatgaaacaaaaagagccgcaagcgccttttaaagaccccggctgcataaaaaaagaggctccccggtccggaacactcatgtgatgcataaaaccgcaccgctttgcacaatgtatgacacagaaaggatgtgtatatgaatcatgggcttaacaagcgaacatcaggtccggttattaaaggacatattggccgaccatcaattggattgctgcgggaccgttgccgaatatgaacagctcgagcgcgtcatcaaatcactgatggccaacaccgggcttgattcaaatataaaaaacgtgctcgaggatgtataccgctacagccagtccggcatcacggccgattccatcgacacgcatattcaggagcaccaaaaccatttgtcccaatgggtggagcagatgaattcgtactcctgactacttgacaatccgcttcatcagggcatgaagctcttccatggcatcatgatacgctttgtcgtttccttttgatttgtgccaggcaatgaaggtgagggtctctgataacatgtaccatgccatccgcagccgcagcccttccgtgagcttcatgccgtacattccaagccagctgtcccacgctggctcttcgacgtaatgatacaataaagggccgagatccatggccggatcggctatcatggcgccgtcccaatctattaaatacagctggttgtcttcagacagaagccagttattatgattcacatcacaatggcagacgactttttcaccgaattgaacctgatccacatgcgcttccaaataagcaaggccttcctggataagaggcgaaaattgccgcacggcaaagacggcctgcttcagctgcgacaaaagggcgcccggatcgagcggttcttttcccaatcttttcagcatgtcgagcaaggctttggatgtgtggattttgcgaagcagctcagccaccgggcgtccgctcatatccttcggcttcagctctctgcccgccatccaatgctgagccgtaataacgtctccgttttccatccgtttcgtccaaaccagcttcggaacaatgccttcggcggataacacggctaaaaagggtgagctattacgttttaaaaaaagctgttggccgttatgtttcgcataatatgcatctcctgtagctcctccggcggggaagatctcccaatcgctacctagtaattgtcccaaccagttcatatcaatgttcaacccatcatttcttaaaatattttagaataggcctccagcctttctcttttcggcggagcagcctgtcataaacaatttcttgagaataaaaaagacagctattgagagtctcatatgctaatcaatagccgtcttataaattttagcgctacagcacaaacttcgtcaagcaaaactagcaagaacacctgtgaattctgaagatttatgtcgtgaaccgctctttgccgagatagatttgacgggttttatttgtttattatgtttttatttttaacggcgctccgcctggcataagccgaaacggcgtcgttccgacaagctcgccgtcagcgtgaagcggaattttcccatccgtttcaaaaatgaattccttcccctttaaaatcgtcactccgtccattttggtatgccggccaaagctcatcgcccatagaaaacggtacagcggaaaaaaggacaggttttctgcaatgacaatatcaaaatggttttcgcggggatttgcagaaggcgccgctttcataccgcctccgtaataaggatgattagccgcaatgacaaaccagacattgcggaattcatgcctttggccgtctgcggtgcaagcaaatctgaacggctgaaaccccgaggccgtacgtatatgcgcaagcgggtaaatcacaaaaccgagacgcagaaaccgaagaacgcgcgaaaacggaaactccgcggcagtcttcaagaccgaggcatcgaagccgacagacagatggttaataaaataaagagattgggctttgtcatgaaaaaagttgatgtttcccgcaaaaaatttccgtgtgagcgggcggtgcaggcctttgatttcatggaggagcgccgacttcttaatgccgaggcctttggaaaagtcattgtacgaaccggcaggcacaaaggtcagctcaatctgatccattcctttcagcccgttaatgacttcatgcatcgtgccgtccccgccgataacaaacagccgcttcagcttatgatcctgcatcgttgaaatctgtctcgccagcacttccgcatgtcctggatgcccggtcaaaaaggagcggtggctaatcccgcgcctggtcagctctttttgaaccgatttccagacacgccggccccgcccgcctcctgagaccggattaatgataaaaaaccattgactcatcgtttgttttcacctgcttcatagatgaagagacatctggcaaacgtccgttttaatcaagccattcctgtctcctgcttgattgactcaagccgtaagacaaaagagccttcgccgccctcagctggtggtgcttgatcggcgccgtatttttctgctgcttttccagccactctgcggcagtccgtttatcagctatatccagcccgtacggcggctccggataatcaatataagacgttctgctgaacaaaagcttcctgacgggaatgtcggcctgcttttctttcatgatttgcgaaacgaccgaacccgtccgattcaggctgagagacggatttaatacttggcgggtgctgccggaacccctttcttcccagaaacgatgttttgatccgatatatacactgtcttcttcagcttccataaaagcagcgcagaaaatctccagcggggagatgatgacgatgctcaattcgacggacgcctgctgaatttgaagaaccggatgatacatcacaaaataggaatcgggcagcttttgagccagcattcttaacatcccgtcccgcttgacttcctgcgaaagctcagacttttgagaaagcgtggagctcgcccattttaattgaaagtcatacagctgggctttgaaaaaagatgcgagctcagacttttgagacggaagattcccgaacagcgcctcatcttcctccggctcatcaaaccattggtgcctcttttcatttatatcggccggattttcttcttttctcttttttaagaaaattttttttcgggccggcgcttgatcggtttcaccgccggcagccgtttctgttgctttttcttcttttttccggtcaaactcttcaagaagggtctcccagcgttccttcttcagccggatatactggttcatatagtgatatggatcaagctcatatcttgatatgcagtcatgaattttgatgatttgtgccatgtgatttccccactccgaatatttgtttatgtcaattgaaactgtgcgatttcttcgtatttaggcgatctgtcaaggtgggtctgaaacaaggaaaaccggctgacggcactttgcaccctgccgctttcaaacggcacatcttccggaaacggccggtctcccgcccacttccgcgccatcgtcatgtgaggatgatacggccgtttttccacttgaaaaccggctttcaaagcagcctgttttgttttttcccgcaaatcaaagagcagttcattgtgttctggctcaaggtgaagcactcttggctgtctgcggtcgccgaaaacgtccagatgctgaaactgtacggtaaacggctgcactgccgacgcagcatctgcgagcagagccgatagttttgcaagccggtcttcatccgcggctccgagaaaaatgagtgtaatatgatagtcatgcggatgcacccattttttgaatgttaatgccggctcctttctggctgcttcccaaatcggttcagcaatgtcagccggaatcggaatgccgataaaataatgcggcaatgaaactttcatgcgaggatctccccctctttggttatggtgttattataaaacggataagcggagaggagaaccctgtccgcttattatgataggatattatgtaccgaacgttttatacagaaaggatgagccggccttgaaaatagtaaacagcacggcggaactgatcggcagcacaccgatcgtaaaactcaatcgccttcagccagaaaatgcagcacaggtctatttaaaattagaatcttttaacccaagcggcagtgtcaaagacagagcggcttacaatatgatcattgaagcggaaaaaagcggacatctaaaacccggctctgtcatcattgaaccgacaagcggcaatacaggcatcggcctggcgatgaacgcggcggcgcgcggctacagggcaatcctcgtcatgcctgacacgatgacgaaagaacgcatcaacctgctgaaagcgtacggtgcggaggttgtgttaacaccgggggcggaaagaatgcccggcagcattaaaaaagcgaaagaacttgccgaacagatccccggaagttttatcccgatgcaattcgataacagcgcaaaccccgatgcccaccgaaaaacgaccgccattgaaatctatcaggccgttttgcagctcaacaaaccgctcggtgcttttgtggcaacggcggggacgggcggaaccattaccggaaccggagaaacgctgaaagagcttttcccggatttgaccgtccatgttgccgagccggcgggttcccccgtattatcaggcggaaaacccggcacccataagcttgtcgggacaagccccgggtttattccagacatattgaatcaggacgtttacgatgaaattatgaaaatttctgatgaagatgcgtatacgacaacccggcgtctggcccgagaagaaggaatactcgtcgggccgtcttcaggcgccgcctgcttcgccgccattgaaaccgcaaaacgcctcccttccgagcaaatcgtcatctgtatgacggccgatacgggagaacgttatttatcaacggatttatggtcatttgaatgataaaaagggatgccgctttcggcgtcccttttgttatcacttggcaagctcataaatggcttgagcgtataaggcggttgaccggagaaggtcatcaatctcaatgtactcatccttttgatgcgcgctgtcaggcctgtcgggaaacagcggcccgaatgcgacgccagccgaaagggatctcgcatacgttcctccgccgattgaaatcagatccgctttctttcccgtctgcccttcgtatacgttctgaagcgtctttacgagcggatggtcggcagatacgtggtgcggtttgctgtctttaaattcttcaagccggaattcttcaacagacataaaggcatcacggatgactttgctgtctgaagtgacagggtaacgaatgttgatgccgagttccccttcctcacccttattgtatgtaaaggtgccgacattcaatgtaagctctccgctgatgtcatccctgcaatcaattttcagctttttgcctcgtgtatcattagaaaaatagtcactgacagttttgacaaagtgctttccggcctcatccagttccgctcgctcaaggcattcagcaagctttaagccggcatttatgccattatccggctccattgcgtggcatgatttcccgtacacccgaagcgtcagttttccattttctgaaaccgcttcaccttgtgtttttgattgctccagccagttgctgaaataggcgtgtacggcatcaagaccgtccccttcaatgaccgcttcagccgcatccggcaccatgttcaagcgcagtcctgaacggaatgacagaagcccgttttttgcgtcttctttatcagaagcgctttttgcaatgcgcagtgatgcgtctataattcctttttctgcgttaatgatcggaaaatctgcgtcaggggcaaatccgacatcaggcattttttcgtgtttgaagtagtggtccacacatctccaatcactctcttcatccgttccgatgatgattctcacgcgtttggataaaggcagctgcatgtctttgacgattttcagcgcgtaaaacgccgccattgtcggccctttatcatcaatggcacctctggcatatatccggccatccctgatgtcggctgaaaacggatcgctcgtccagccgtctccgggcggaacgacgtcgacgtggcacagaacaccgacgatttcgtcacccgtcccccactcaatatggcccgcatagccgtcaagattttttacggtgaagccttctttttcaccgaattccaacagtgaagtcaggcagtcacctacgccttctccaaacggccggccgggaccggctgttgattcgtccattacgctgttgatttgcagaaacttctgcgtgtcacgaatcagatcttctttgtttctgatcacttcaacttcccagttcatcacaaatcccctttcttgataaagacttgcaaaatgttgataaaacgaataatatagatgatgttttgaaaaaatgttcgtcattggaggtacttatgtttcatctcgacaagcatcaaacgacaataaaaagagaaattaccgcgggattgaccaccttctttacaatggtgtatatcattgtcgtcaatccggtgatcctttcaaatgcgggaattccgtttgaccaggtgttcaccgcgacgattatcgcttccattgtcggaactttatggatggctctcgctgcgaattttccgatcgccattgcccccggcatgggcttaaacgcgtatctcgcctttcatgtcgtcggcgcaggcagcggaattacgtatcagacagctttcagcgctgtatttatcgcgggagtcatctttattattttatcgttaacgcctttaagaaaacaactaatagaagcaattccgggcaatttaaaatacggaattacgaccggcatcggcttatttatcgcttttatcggcttacgccaatccggaattatcacagctgataaatctaatttagtcgcactcggcgatcttcattcgcccgccgtcattttaacgcttatcgggcttatcatcagtattgtactgatggtgctgaatgtaaacggcgctctgttcatcggcatggcgctgacagccgtcattgccttcttgaccggccagatccattttacaaaaggattcctttcattcccgcacctgccggaggggctgttgataacaaatccgttcggagccctcggggatgtcgtacatcacggtctgtatgccgttgtgttttcttttcttctcgttacgatttttgacacgaccggcactatgatcggtgtcgccgaacaagcgggattgatcaaaaacaatcagcttccgaatgccagaagagcgcttttggctgattcgaccgctacgacagtcggaagcatcttcggcaccagcccgacaaccgcgttcgttgaatcttcagcaggggtggccgccggcggaagaacgggtctgacggcgctgacgattgccgttatgtttgctgtttccatgtttttcagcccgcttgtcagcgtcttatcggaagtgtccgcgattacgtcaccggctctgattattgtcggcagcctgatgatgggagcggtgtcgaatatccgctggaatgaacttgatgaagcgttcccggcctttctcgtcattttggcgatgcctttgacgtccagtatttcaaccggaatcgcactcgggttcatttcatacccgcttgtgaaactcgctaagaaaaagtggcgcgaaatccatcctttagtcatcatctttgccgtgctgttttttattcagctttttattttaaacgggcattaagaaaaatccctttcctttttcggagagggatttttcacatataaagggcggaaagaatcgcggcaatgaggcaccaggcggaacagatgacttgaatgagagttaatgcgctgtttctcgcccgaaaatagtcatcactctctctcttgattccgcttaaaaccggtttgtccgtaatccggtcaaataaaagcgaagcggcgtaccggctgactagcatacataaaatgagggcggccggtttcagcaaaagcggaagaacgagaataagagccgtaaaagccgcggttaaaaggtaaagctgccggagatacccgccattacggatcagcactttaaaaaacaattctttccacgccgtatacgccgaccgttttgaaaagatatgctttgagccgggataaaaaaacggcttgctccgtcctttatttttcacattcggcagctgcacatcatgactgagcatcaaaacagaggccgcaaatgaaagcttgcgcttattctcctcaagcacttcttcctcaaaagctgataaagaatctgcctctttccaagtaacaagaacggagcagataaacaatatacagcctgccggccaaagccagtaccactcggcggcaaagcggatcatgaaaaacgcgcccgccatcataacgatcactttcagccagcctgacgtctgattcccgaatgtctgcctgctgttttttctttgccggtgcaccgctaatatcgcggtatggaagccgaacagacagcaaaacatacctgaatatgccgaaaaagtacagtcaccgtactggcgccataagggaaataacagcaccgcaagcactccccatttgatgaaagataggaacatcgaatacaagagcgcgtaccgtttcagctgttgcatcaaatgttttgcatgcaccaaaaacacgtgatccgcttccagcaaaaaggtatgaataaaccccgtgcacaatagcaggacactgaatacatacagccagtcccagcccaatacgccggccgccccatcaagaagccccttcccgttcagccattcagcatattggtaaacgacgaatgcggcagctggaagaacgatatacagcgcgaccgtccaatcaatgatcgtccggaacaccttccattgataccgccaataatgaaacatcctttgaaaaaacaaagcccgcccggtcatcgctgactgccccgaaccgctgaataaaagcaatctaacaatgaacggccccctgttctttcctgaagctcttctaacgcgccttgaagaagcagagcgccttgatccagcaaataaaaacggtcgcagattttttcggcagtatccagaacgtgggtgcacatcagaatacccgcgcccctttctttctcagcaatcagcatgtcggtaaacagcttcgttgagatcggatcaagtccgataaacggttcatcaatgatgtaaatatccggtttcgccaaaaacgcctgcatgagcatcagcttttgctgcatcccttttgaaaaaccggaaggcaattcatgttttaccgccgtcaatgaaaattcatcaagcagccgcccggcccgctcacgccatgctccgctttctatgccccgtaatgatccggtcagctcgagatgctcccagagcgtcagttcatcataaaaactcggccgctccggtatgtaagcataagatgaatcattccactcaatacacccttccatatcccgggacagcccgagaatcgcctttatcactgtactttttcccgcgccgttcgccccgattaacccggcaatttctctcgaattgaccgtaaaagatacatttgaaatcaccttcggcctgtcagcatagccggcggatacaatgtttgcattcaataagtctcccaagcttctcactcccccattttcatacggacacgtataaaaaaagtttcagtttccatactaataaaagcgggccaggcatagtaatgcaccaaggcggcacccaattggaaaaaattatcggcgcttattcctagattcgtgtcctccatatcgtgtataatggaggcagttaaaagagaaaaaacagaatgtctgcctttgttgcttattcgtacgaagttttagagtcgtgagttgtggtatatcaagtccatccgatcttatgatagggagtggttttttgaaaccttcaacaaatcgtatgctgactcggattaaatcagtttacatgttcattcaggaaaaaggccttgtgacaacacaggaactggttgatgaattcggcattacacctagaaccattcagcgagacttaaatgtgttagcatacaatgatcttgttcatagtcctagccgaggcaagtgggagacaacacgaaaaaaagtgaaaattacatcttaagcgaacaattacatagggcccttttcggcctgacatgctgcaaggcaaaggcagcgtctttgccttgctttttgttcctctatataaaaaacccaaaacaaatctgttttgggtttttctgatttcgattacatttcagcatctttcagcgctgcgagctcttcttctgtcagctcgcgaaattctcccggcttaagctccgggtcaagagaaacagcccccatcgaaagccgctttaaataagccacttcatttccgacggcctttgccatcagcttcacctgatgatacttgccttctgtaatagtcaaatgaatgaccgtttcatccggactttcggtaatcgttttaacggctgccggcttcgtcttatagcctccttcaatcacaacgcctctttccagatcgatgatgtcttccggagacagaggtgatgttagccgaacctcgtatgttttgggtacatgctttttcggcgaaagcagacgatgagcgagctgcccgtcgttagtcagaagcaaaaagccttccgtatccttatcaagacgtcccgccggaaacggttcgaaccgctgttcttcaggcgtcagcagatcaaccaccgtttgctggcggctgtcttctgtagcggacagcactccttgcggcttattcatcatgacataaataaactcacggtactctgccggctctccgtataccgtgatgtcctgtttatcgggatcgacatggattttcacatctttcgccggctctccgtcaatcatgacagcccctgccttgacgatttttttcacatcttttcttgagccgaatccgctgttggcaagcagcttatcaagtctcatcatgatcctctcctttaaaaagaaaagcccgcgataagcggactattcattattcctcaatgggcggaatgcctgcctcttctcaaaacgcggggcagacggtttccaaacattttctgcaaaaatccgattcggtacgcggcaaacatgtacaccgcaccgccgacagcagcacagacaaagacgacaatcgccgcatgcagctggccgctttggtacgtgacgaaaaagccgagcagccattgagtcagcttgaccgcaactcccatcacgacggataagaccgcaattaaaatgacccgtttcataagcactgtatacgaatagcccgcatggcgcttaatcatgataaaaccgtacagtagagaagcgatataaccgagcgccgttgccaatatggccccgtctccctgaaacagcttgatcagcggcacgttcagcaccacttttataatgacgccgatgaaaaggctcacgacagcaaatttctgcttattaatcccttgcagaatcgcggcgtttacggtaaacagagaaaacaaaatcgcgacaggcgcgtaccagaacaaaatatcctgtccgatatccgggcgaaggctttcagagccgtagaagaacgtataggccggccccgataacacggacatcccgacaacggcgggaataaccaaaaacagaatgatctgcatcgtctggttaatctgctggttcaaaagcttataattcctgctcgtaaatgattcggtaatcgtcggaatcagtgtcaggccgaatgcggtcgccagtgaaaccggaatcatcacaagcttcggcacataaagagtgacaattgccagcatgtcctggctgatgtccttatggcccgccgcaatcatcgctttattaaacgtattcgtatcgatataagaatacaaaggaatcgccaggccgacaaaaacgtaaggagctgcatagctgaaaagctcaataaacatttttttatagcttaagtttgcggacgggacgaggttcggcttcatcgccagaagatcgcccttccgcttattccagtaaatataaaggacgacaagccctccgaatgatccgatcagcgctgcgaaagtcgcatatccgactgcgatgacaaggccgccgttaatcactcttaaaatcaaatacgtcgcgcccaataaaaagatgatccgggcaagctgttccacaacctgagaaacggctgtcggccccatcatctgatggccttggaaaaaaccgcgcacaagactcataatcggcacaaccaaaagtgccagactgaccatccggatgacataaacgacgtggtcaatcgtaagtccgttattactcgtgccgccgagagatgtttccgcaaaaaacggcgccgaaatataaagaatcgaaaaagcgatcatcccggtaacgagcataaccgacattcccgctctcagcatacgcctgctcgtttcatagtctcctttggaattatatttcgagacaaactttgaaaccgcggcgggaaatcccatcgtggcaatgtttaaaaacagtgtatattgattatatccgtattgaaacaaagctccgcccgtcgctccgaccatcgctccgaacgggatcagataaatcatccctaaaatccgcgatatataggtgccgagcgtcagcacgaacgtgccccttaacaatttgcttgacatgtttcctcatcaccattttctacgaagattcaacttttctattttaacacaactgggcaaatagacggtaataattacagcggaaaacttcttgggaaagctctaaaaaaacaaaatacgtttaaggaatcccctactttcgctataatagcaggaagcggacatttccgcctattattacgcgaaaaagaaagttgttgatgaaatatgaaacattttgacgtgattgtgatcggcggcggcccgtccggtttaatggctgcgattgccgcaggcgaagaaggggcagatgtcttattaattgataaaggaaacaagctgggacggaagctggcgatttccggcggcgggcgctgcaacgtaaccaaccgcctccccgttgaagaaatcatcaaacacatccccggaaacggccgcttcttatacagcgcgttttccgaatttaacaatgaagatatcatcgccttttttgagaaactcggaattcagctgaaagaagaagaccacgggcgcatgttcccggtgacagacaaagcgcaaagcgttgtcgatgcgcttttgaaccgtttaaaagaactgaatgtcaccatccgcacaaatgaaaaaatcaaagaagtgcggtacgagaacggcagggctgcgggcattacgacaaacaatgacgaacacatttccgccggcgccgtcattatcgccgtcggcggaaagtcagtcccccacaccggcagcaccggagacggctatgcatgggcggaagcggccggccacaccgtgacggaactctttccgacagaagtgccggttacgtcctcagagccgtttattaaacaaaaaacacttcaggggctgtcccttagaaacacggccgtcagcgtcctgaataaaaaaggcaagcctatcgtcacacatgtgatggacatgctgtttacccatttcggcttgtcaggccccgccattctccgctgcagccagtttgtcgtcaaagaactgaaaaagcagcccgaggtcaagctccgcatcgacctgttccccggcatcaacgaggaagatttatttcagcggatgcataaggagctgaaagacgcaccgaaaaaagcgctcaaaaatgcgctgaagccgtggatgcaggagcggtacctgcttttccttctggaacggaacggtcttgatccgcaaatcagctttacggagctgccgaaggatcaattcagggcgtttgtcaaagactgcaaacaatttacggttgctgctgacggaacgctttctctggacaaagcgtttgtcacaggcggcggtgtttccgtaaaagagattgaaccgaaacaaatggcgtctaaaaaaatggaaggcttatatttttgcggagaaatcctcgatattcacggctacacgggaggctacaatatcacctcagcccttgtcacggggcgcctcgccggcttgaatgcaggacgtttctcacactcgctgtaagatggtctaaagcacatttacctgagcgcccccattgaaaattgaccaaaaacatgatagagttttctgcgttttgtttcacctgattgagggaataggaagaaaggaatgatctgcaatcgtacgaccatactaaaacaaaatggcgtatcgaaaaaatagtcagagggtgagaacgtttgaaaaagaagaatatctccagtgttttttggattgtgattgttatcacagccgctgcggttttatggggtgtcgtttctccggacagcctgcagcaagtcactgaaacagcgcaaaatttcattacggattctttcggctggtattatctgctggtcgtttctatatttgtcggtttctgtctctttctcattgtgagtccgatcggcaacataaaactcggaaaacccggggaaaaaccggaattcgggttattatcatggtttgccatgcttttcagcgcgggcatgggaatcggtttggtattttacggggctgcggaaccgatcagccattacgccatcagctctccctcaggtgaaacagaaacgccccaagcttttcgtgatgcgctccggtacacatttttccactgggggctgcacgcttgggccatctatgcggttgtcgctttatgtatcgcatattttcaattcagaaaagacgcgcccggtttaatcagcagcacactgacaccgcttttaggcgataaagtaaacgggccgatcggcaaggcaattgactgtatcgccgtgtttgcgaccgttgtcggtgtggcgacaagcttgggtctcggagcgactcagatcaacggcggtctgaattatttattcggcattccgaagacattttccgttcagctgatcctgatcgttgtcgtgaccgtgcttttcttgatttctgcgtggagcggaatcggcaaaggaattaaatacttaagcaataccaacatgatactcgcgggtattttgatgatctttatgctcattgcaggcccgacggttttgattatgaactcatttactgattctatcggccaatacatccaaaatatcgtgcagatgagctttcgcttgtcaccgaatgatccccaaaagcgcgaatggattaacagctggaccattttctattgggcctggtggatttcctggtcgccgtttgtcggcatatttatcgcccgggtttcaaggggccggaccatccgggaatttttaatcggtgtgttagtgacaccttgtatattggctttcttatggtttgcaatcttcggtgtatccgctatggatcttcagcaaaaaggcgttttcaatgtcgccggaatgacaacggatacgatgctgttcggcgcactcagccactatccgctcacaatggtgacatccgtattaacacttgttctgatcgctgttttctttattacatcagcagattcagcgacatttgtgcttggaatgcaaacgtcttacggctcattggacccgtcaaatcgggtaaaaatcacttggggcatcatccagtccgccgtagcagcggttttattatattccgggggtctggccgcactgcaaaacacggccattctcgctgcggtcccgttttcagtcgtgatccttctgatgatcgtgtctctgtataaatcattagtgagcgaaagaaaaggaatcaaacaagcggagaaataccaaaagccgagaagtccccgcgtcaaaaaagcataatgcacaacgaagcccggcattcgcccgggcttctttactttcggtataaaatgagagcggaaaaacaataaagctgctccccttcaggatcacaggcagccgctaccgtatatttaatatcgacgagctgttcttcggaaattccttttaaaaatgaattgacttcagtctgcagatccttttcatgctcctcatcaaaaacagctatcttcagcatgtcaccctctcctttctctatcaatttattccggttcaactgaaatatgatagagaaaaacagatttccctttttactgatttttactaaaaaactccaaaaaaagttgttgaaaacgcttactaacatgtgataatatcactctaacaataaccaggtcatttctatttagtaaatttttagtaaaaaggagatgcgaaatggtccgtctcaaagatattgccttacaggcgtctgtatccagcgccacagtatcgagaattttaaacagagatgactctttagccgtgactgaagaaacaagagaaaaagtcctgcggatcgccgatgagctgggctatcagccgtcggcaaaaaaacgaaaaaaccgcagccgcaatgattctgcccccctgatcggcgttgtcagctgcctgtcaccggaggaagaacggcaggacccttatttttcggcgatcagaaaaggcattgaagaagaatgttttcagcaaaaaattttcatcacttcttctatccatctcggttcttttcaagagcatatgtttcacgaattggacggtgtgatcgtaatcggcagcctccaagacgaggcgctcacgaatatcagcacctctttcagacacgccgtatttgttaacggcatacctgatcccgcccgctacgactccgtcagcgtagacttttatgccgcagcgcagaaagcgatagaacatctgctgtcgctcggttatcggcggcttggttatatcggcggccgggagcgggagcataccgtgatagacggtgtaaacagcaatcaaacaattgaagataagcgcctgaccgctttcttacaaatggccggcgccgagccggagcacgtgctggtcggcgaatacagcatgcacgaaggtttccggctgatgaaggaagccatcaaaggcggcagtctgcccgacgccttctttattgcaagtgattcgatggccatcggcgctttaaaagccctgcaggaagccggccttcaagtcccgcgcgatacagcgattgtcagcttcaacggcattgatgaagcggaatacgccagcacgcctttatcaacggtaaaagtatatacagaagagatgggccggacgggtgtcaaattgcttcttgaccgtttgaacggcaggaccgtcccgctggccgtgacgctccccacttcactgattgtcagacaaagctgcggatcacaagaaaggaggtgacgtttcccgcagcatttatatcatatttaaaggaggaaaagatgaaacgcttactggttttgtttctttcttttatttgtatgatacttcccggctgttccgcgggacagagcagcgcaggagaaaagcagaaaaccttgaccgtctattccactatatcctcagacagcgaacgcgccgtgttcagagaattggctgattcattccaaaaagaacatccgggcattcaagtaaaagttcatttcccaggcaatgactacgaaaatatgatgagagtcagaatggcggccgatgacatgcccgatctattcgacactcacggctgggccaaaatccgctacggagaatatacagccgacctcagcggcatgtcttggacgaagcggctcgatccgaatttaaacagcatgctcaaggacgccaaaggcaggatatacgccttccctctgaatcaggcaaaggacgggcttgcttacaaccgcacccttttggaaagatacggaattaaaccgccggacacgatggacgatttcatgaaggcgctgagacaggttaaagaaaaaagcggcggaacagtcactcccttctggtttgccggctatgagaaaagctcatttgcccaatattacgatcaattcgccgcaccgcttctcatcacagatcccgctcaccgttacaaaaagcagctgttaaacggaaccttccgctggacacacttcacctatttatctgacaaactgaaagagatgcaaaaagaaaacctgctcaatacggatgccgtgacggcaaaacgttcccagctgattgatctgatggcgcaaaacaaaatcgcctttacgctgcagagcggcaccctcggccaagacgtcgctcaaatcaatccgaaggtaaaagtcggcatcataccgaccccggcagtccacaaaggagacgcaccggtatggatcgggggcgaacgttatacgctggcggcatccaaggattcctctcggctgaaagaagcgaaacagtttatcgcatttatggcccgtccagaacatgcaaaatcaattgccgaagcgacctcgcttccggcaggattagtgaatgtaaagacggacattttttacgcaaatgactataaacgctatcagcatattaaggtgcagccttatttcgaccgcctttatttgccgaacggaatgtgggatgtgatgggcacggccgggcaggagctgatggctgatatcttaactccctcagaaatttcggcgaaactcggcagggaatataagcggctccgtcttcaatctgattcacagggagctgaagaagaatgagtgatcttgcaagagaaaccgccggatttcaaaataaaaagccgattaaacccgcgtcattatggtggatgtacgtccctgctcttgccacggtttttattttcatgatttttccgtttgccaaaggcgcttttatcacatttacaaactggaacggcttctcacagacatatcaatgggtgggggtcacccaatataaaaggcttttgacagacccggacacatggctcgttgtgaaaaacactttgctttacgggctcggaagcactttttttcagaatatgctcgggcttttatatgcgctgcttttgaatcaaagcttaaaaatgaaggcgctcacaagaacgatcgtctacctgcctgtcattatcagtccgctgatcatgggatacatttggtattttattttctcgtatgacgggggcgcgctgaatgatgtgcttggcgcgttgggtatcggttctgtcaacgccttggcaagcccggcggcaaacccgtggatcatcgtcatgattaacacctaccaatacgcaggcattgcgatgattgtatatttggcgggcctgcaaagcattccgaaagattattacgaagcggcaaaaatagatggcgcgggaggccttcagccgtttttcaccattaccctgcctttattgatgccggctgtcaccatcaatatggtcatcaatatcatcggaggactcaagctgtttgatgtcattttcgccctgaccgcaggcgggccgggcaattcctcccaatcgatgtcgacatttatgtatgatttatattttaaacggcaggatgcgggatatgccgccgcccaaggcgtgtttatgtccgtcattattcttgtcatcagcttttcggctctcgtgtatttcaaacgaaaggagacggaaatgtcatgaaaacagtccgaatgcggatctttaccctcttggctgccgtcatctcatgcgttcatattgtccccttttatatattgctgaccacgtcattaaaagcaaaaggagactacagttcaaaatggtcgctgccctccgctttttcatttcagaatttccgtgaagcatgggagcgggcctctctcgggcaatcttttctgaacacgatcatcattacagccgtttccgccgctttgttaattttcatgggttcgcttgccgcatatccgctcgcaagaagaaatacgaagctgaataaaatcgtcttcggccttttgatttcaattatgatcatcccgcctttgacttccatggttcctttatacaagatggtcgctgatgcgggactgatcaatacgcatgccgcagcgattctcattaatacggctgcatatatgccgctgaccgttttcttatattcaggatttatccgctcttccattccgaaagagcttgaggaagcggccaagatggacggcgccggattgatcaggactttttatacgatcgtgtttcccctgctgaaaccgattaccgcaacggtctgcattatttcctgcgtgtttatctggaacgattatcaatttgcgattttctttttacaagatcaaaaggtgcagacgttgaccgtggccatggcgggattcttcggcgaaaacgcgaacaatcttcacttagtcgccgcagccgcaattatggcgatgctgccgatggtcgttttgtttttggcccttcaaaaatattttatctcagggctgtcctccggggcagtcaaaggctgagaagaaaagggaggaatttctgttgaagaaaattacgtttatcggagcgggaagcacgatatttgcgaaaaatgtactgggagactgtttactgactgaagctttaaacggatttgaattcgcgctttatgatattgatgctgtacggctgaaagaatcccagctcatgctggaaaacatgagagaccgctataatacgagcgtatccatcatttcttacgatgaccgaaaacaggcgctaaaacaggccggctatgtgataaacgccattcaggtcggcggttataaacccgcgacggtcattgactttgacatccctaagcggtacggcctgcgccagacgattgccgataccgtcggaataggcggcattttccgttcccttcgcaccatccccgttttatttgacatcgctaaagacatggaagaggtctgtccggatgcgtggctgttaaactatacaaatccgatggcttctctgaccggcgcgatgctcagacatacaaatgtaaaaacggtcggcctgtgccacagcgtacaggtctgtacaaaagatctgtttgactcactcggcatggatcacgaaggtacggaagaacgcattgccggcatcaatcacatggcttggctcttagagatcaaaaaagacggaattgatttgtatccggaaattaaaagacgcgcccgcgagaaacaaaagacgaaacataatgacatggtgcggtttgagctgatggataagttcggctgctacgtaacggaatcatctgagcacaatgccgaatatcacccgtattttataaaaagccggtatccggagctgatagatgaactccagatcccgctagatgaatatccgagaagatgcgcagaacaaatcaaaaactgggaaacgataagagacggcatcatcaacaatcaaaacctgacgcatgagcgctcgaatgaatacggttcgagaattatagaagcgatggagacgggccgtccgtttatgttcggcggcaatgtgctgaatacgggactcataccgaatctgccggcgaaagcagtcgttgaagtgccttgcgcagccgttaaaaatcaaattatgccttgctattcaggcgaacttccggaacagctcgcggcgcttaacagaacaaacattaatacacagcttttaaccatcgaagcggccgttactttaaaaaaggaagccgtatatcaggcggccatgcttgatccgcatacgagcgccgagctttccatgaatgacatcatctctttgtgcgatgatttatttgaagcccataaagactggcttccggcgtatcactgatcattcgcgatccggccccggagggggctggatcgcttttatatgttcagcaccagtttgaccgtctgcagggtgtgtcctttaaagtcttcttcaaattcacatacccggtgaaaccctttcgcttgataaaaggacaaggcggtgcggttctctttttctgcatggacataaagctcttttattccggcagactgtctgatacattctttaaggagtgacgtgcctatcccgtttccctgaaaacccggatcaatataaatagcggtcagctccgcttttccgtctttttgaaccggagtgacatttgcaaagccgagtacttttccctcttttccttctgcaacaaagaacagagaatgctgaagccggcgttccatcatttcatcctgataggcggatttgagaaactgatcctgaatgtgtctggggataatcccttcatacgtatgatgccagcttcgttctgcgacttgccggacctgtttgatatcacttgctttcatagcacggatcatcggtttcacttgattcgcctcccgtttttttctattaaaaaagaagaaaaagacgtacgttcctttttcttctttcactacaaaacgttatttcttcggctttgtttcgccttcccactccagcatgccgccttcaacattaaccgtacggaagccctgctcatgtaaatacatgcaaacattcatgcttctttttccggaacggcagataaatacatattctttgtccttgtctaacgcatccatcttctcagggatgtctcccatgcggatatgaacagcctgcggaatcattccttcggctacttcttcatcttctctgacatcaatcagatacagctcttctcccgcttttaatttctcttccagtgcggctgtgctgatttcatttattttcaatgtgtgacactcccattcgtcttaatgattttaagtataccaaagcctgcggggcaatttctatgctagaggcctgataaaaaaacccctctttttatgagaggggcttcgcccggtcagtttgccacaatattgacaagcttgcccggtacggcaatgatttttcggatcgtttttccttcaagctgctctttcactttttcgtcagcttgtgcgagctgttctaatgccgctttatcggcatcagccggaaccattaatttcgcttttacttttccgttcagctggacgacgatttccacttcatcatcaaccagttttgattcgtcataagcaggccaagcttcatatgcaatcgaaccttcgtggccgagtttttcccacagttcttccgccaaatgcggggcaacaggagaaagcagcttcacaaagccttccatatattctctcggcagttcattcgctttgtaagcttcattaatgaagaccatcagctgagaaatgcctgtgttaaaacgaagggcttcgtagttttccgtcaccttcatgactgtttcatggtagacgcgttcaagagtttctcccgcgccttctgtcactttgccggtaagctctccgttttcctcgataaacaaacgccatacgcggtcaaggaagcggcgggctccgtcaaggccggattcagaccaggcgatagatgcgtcaagcggacccataaacatttcgtacaggcgcagcgtatctgctccgtgagacgccacaatttcatccggattgacgacgtttccgcgggatttactcattttttcattattttccccgagaatcattccttggttatacagcttttggaacggctctttcgtcggcacgacaccgatatcatagaggaatttatgccagaaacgagcgtacagaaggtgaagcacggcatgctccgctcctccgatgtagatatcgacaggcagccatttatccagtttctcaggtgaagcgagctgatccggatttttcggatcgataaagcgaaggaagtaccagcagcttcccgcccattgcggcatcgtgtttgtttcccttctgccttttctgcccgtttcaggatcagtgacttccacccactctttaatgttggcaagcggtgattcaccggttccgctcggtttgatctcatcggttttcggcagaatcagcggcagctcttccgcaggaacggctgttgacgtgccgtcttcccaatgaatgaccggaatcggctcgccccaatagcgctgacggctgaacagccaatcacgcagacggtatgtcacttttttctcaccgtttttcgtttcttcaagccaggcgatcattttttcaatcgcttccgctttattcagtccgttcaaaaagccggaattgacatgctctccgtctcccgtgtacgcttcctcgtctgtgtttccgccttttacgacttctttgacaggcaggctgaacactttggcgaattcaaaatcgcgttcatcatgcgccggcacggccataacagcgcccgttccgtaagtagcaagaacataatcagctatccagatcggcagcttttcaccgtttgccgggtttacggcatatgcgcccgtgaagacgcccgtttttgttttcgcaagatccgtccgttccagatcacttttcgcctgaacttctttaatataagcgtctaccgcttctttttgttcagccgtcgtaatggcttcaacaagctcatgctcaggagccagaacggcataagccgcgccgaacagcgtgtcaggtcttgtcgtaaacaccgtgaacgtgtcatcagtgccgtcgattgcgaaatgcacgtttgcgccttcagaacgtccgatccagttgcgctgcatgtctttaatgctttcaggccagtccagatcttctaaatcttcaagaagcctgtccgcataagcggtgattttcagcatccattgtttcatcgggcggcgttcaaccggatgtccgccccgctcgcttttgccgtcaatgacttcttcgtttgcaagcaccgttccgagtgccgggcaccagttgacaggcacttcgtctacataagcgagacctttttcgtacagcttggtgaaaatccactgcgtccacttgtagtagtccggatcagtcgtattgatttcacgatcccaatcataagaaaagccgagcgattggatctggcggcggaaattatctatattgtgtttcgtgaactcagccggatcattccctgtgtcaagcgcgtattgctcggcaggaagcccgaacgcgtcccatcccatcggatgaagcacattgtacccctgcatgcgtctcatacgtgaaagaatatcggttgccgtatagccttccggatgcccgacatgaaggccggctcctgaaggatacgggaacatgtcaagcgcgtaaaacttcggcttgtcattctcttcactggcggcgaatgttttatgctccaaccagtaattctgccatttcttttctattttttcgtgctgaaaactcaacgcaaaaacctccttctgattgaatacggcgtatgtagtccaagtattgacgggatgagaaagattatattcagattattctaaaactaaaaaaactccctcatcccaaaaagggacgagagatttttgtttcccgcggtaccaccctcgttagcgcggtttttagccgcactcacttgatacttttaacgcagttatgcgtcagcggttttgccgctgcaactctgaggcgagttcggaaacagacttgattgacttgcaccggccgtcaactctctgactgcaaaatctgcttcttactgctcctcttcactgttcttatcgctaccgtaatcttacctgtattttatagaattctgttcataagtgcaagcaggtttgtatacaatgggaatgtacccagaacgggtcatgagcggggatattattttgatggaggatttttttgctggtgtggttttgcttcggccgaatcactgttttgttccctgacaaaatcaaagcttctgagaacagcttctccgccgtagcctgcgattatggataagatgacgagttgaattcctgaatcggggtcagcggataagacaagtaagatggaagcagccattccgataaaaccatcttccaaaaaaccgagatagataaaccgctttgtcattctgggtttctccagcctgcctctctttttcacatgaccgagaacccccatgattcctccaattacacaagcaataattacctgatgcagcatcttcatcaccttcctaaagcccttatttagtaaagcgacttcaggccatccagcccccttacgaatacgatgattttcgatatctacataccggcgaatgagcaggaaagtaaaaagcttgtttcttccattatatgtgaacacatgatcggtaagcttgatgcattagattcatttttcacccagtgacaatgacctagtcacttacttagcggcgatataccttctccttatatcttcagtgtatatgaggacaagcccgaatgacaaatcgcaaacttcggctgcttgaatcagaacatatgttatgctacggttactgtagattcatttaaaaaggggagaaacaacggctgaaaaaagcgcacagctttacggccaaaagggggttttatatggctgactcaaatgtattcggaaaactggagcagctggagcttatcaaaaaggcgcttgatcacgcacgcatcggcgtggtgattacagacccctctcttgaggacaatcccatcatatatacgaatcagggatttatggatatgactggctattcttccgaagagatattaggtaagaactgcagatttctgcaaggcaaagaaaccgaccgaaaacaagtcgcgaaaataagaaaaagcttaaaacataaagaaaagatcacggtgcggctgaaaaatgtaaaaaaagacggcaccccgttttggaatgaactcaatattgatcctctttatgttgaagacaagctctattttgtcggttttcaaaaagacatcacagagcagaaagaatacgaaaaactccttgaggattccctcgcagaaattacgatgctgtcaacgccgattgttccgatcagaaacggcatctccgccttgccgttagtggggaacttaacagaagaacgatttgactcaattgtgacaactttgacggacatattaaccgcatctaaagatgattacttaattatagacttatcaggtttggccgaggtgaacgaacagaccgcggaccggattttcaaattgcaccacctgcttaaattaatcggcacagaattaatcatcaccggtatcaagccatcccttgccatgaaaatgaatcagcttgatgccaatttttcttcatttaagacctatttaaatgttaaggacgcagtcaacgtgcttcctgtcgtataaacaaaaatcccgccgaaacggcgggatttttttgacgtcatcgcacttggacgttttgtttatgaacagctttcaggcgtttgtcgtaaagcaccgtcgctgcgatgctgacgacaagaagcaccatcaggatcaagagcagcacgctcatgccgtactgatcaaccagcacgccgccaaggagcgggccgatcattctgccgcccgtcgcagcgctgttgacgaacccttggtaaaacccttcttttcccttaggcgcaagctgattggcaatagtgggaacggcaggccagacaagcatttctccgatcgttaaaatcaccatcgcggtgaggtacatcggaaattgcttggcgccgagaagcacgccgaacgagacgataaaaatacaaaagccgatgaccatctgcgtttttaacgcaccggaccattttttcagaacaactcctataagaggctgtccggcgacaattaatattccgtttacggtccagagcacactgtataatgaaagcggcataccgatgctttgagtatgtgacgcaacggttgtggaccattgcgaataggcaatccacccgagaacatacccgccgctcagtataaggagcgccgtaaatttcgttctgctgctgacaggctcgtagtccagaacagagacctggcccgcatttccggttttgatatttcgaaaaccgaaaaatacaataaggaaaaacagcacatacagcaaggcattggctaaaaacacgtacgtaaacgagtacgccgcaaccattcctcccagtgcggaaccgacagcgacacctgcgttctgagctacatatatcgcattaaaagctctccgcccgccttctttccagaccgctcccgccatggcgtagctggccgggaacacgatgccggaaccgaacccgacaatgatgagcagccaaatataaacgggccattggtgaaacagtacaagtccgagaagacttgccaaagtgatcataatgcccaacataatggatttgaatccgccgattttatcaaacaaaaatccgccgcataaattccccgctacactggctccggaattcagcatcagaacaatccccgcaacagtcagcgatttccctaaatgattatgaatatagatcgtattcagcggccacaaaaaagatgcgcccgtcacattgataaacattccgatgattaatatcttcaaagcgcgcggcataccgatccccctttctctataaaaaaatccatgaaaaaacggaaaccgcaagctgcagctccgtatcggtcgttatcatagcacattcattctatccccgcggacgccttttttcaacataagaatctgaaaaaaataatgccggaatgttgaaaaaattacaaatgattggattcacaaaaacagcccgccatcatgctcttttcttcagcagccaaaacgggatatacagaatgaaaaagctcaatatcaccgccgcttccattgaaagaagataccacggccaaggcccgaaaacattcagaagcgaagcggtcttcggttttttcattaaataaaggtagttcgcattcagcacacgatcaataaaaaagacacacgccccgtacagattgacgatcagcactgacacccaaagtgcgtgcaccgacggtctgtacttttctgcactggccataaatagacaggcaagaaaaacacagccgtgagagacgaaaaacacgatataccgaaaatgagggaaggtatacgcccctaaatcaggcgtagccatcgcctgtatggcgctgcccaaaccggcaaaatagaggaaggcgaacagctttttgctttttgtcataaccatcagcatcgccaaatagacggataggtcgctcagctgcagcggcagagatgttttcagcgaccaggcatgatgaaagagcagccatatatggtagcagatctgcgacacggcaagaagaatgaacagcacatatcggaaaacgcgattcggccggccgtgattgagctttttccgtaatatgatcacgaacactcccagcaatccgatgatgaaaagcgtgaaaatgtgttccgcagaaaaaagatgaaaggcccctgtttcagatttcaattgaaaatatttctgcataaggctcccccgcgcgaataaatgacgtatgtctattcttttaaaaatcgctttcttctattcatgcaaaaaaagcctccgctgtgcggaggctcctcaacttattttacaatgcggattgaatgacttttttataataaagcaccgacaatatgccaaatatggaatacagcaacgtatacagcgccatgaccatgatcatcggcgtccacacctcggttccgaataaaaaccatcctgactgaacggcgaaatagctgtggaaaagcccgagaacgagcggaatgccgaaatgatacgcctgcttccggcggatgcctttcagcagatctcccgttgtgaaaccgagcttccgcaatatcgtgtaatcagccttttcatcctcgcactcgcccatttgtttaaaataaaggatacaccctgaggtgatcagaaaggttaagcccaaaaacccgacgataaacatgatcagccccatgtttttcttttgggtgtcagccgtttcaaactgtgaaagcgcgccgtctgaatagcgctgcgcctgaaacaggtcatcagctttttggacgtcctcttcatgtttgagtgtaatgccgaaaaattgatttgattttccctggatggatgggtcgatatctttctcaatccggtcaaatacatgctgcgtgacaataacggtcggcagtcctccgcttgtgaatgtataagacaggatgaagtcgttcttcaagcccttatacgcgagcggtattttatccgttttgccgtttacttcaatggaacccgacgtttttaggtcgagaaattttttcatcatatcattatatccggtaaacacagcttctccgtcagaaagtgccaccccttccgcgtctttctcacttacaatcggcagcgccaagtgggatgggtcttgtttaaaacttttcatatcaccgtttatgatgttcttcatattgacaccggcctgaatggtcttgattgtcttcacttgatacccaattccgttttttttcaataaggcggtaaatgagtcagcctccttttggttatcaaacgcaaagtcagccgccgtattttgctcggctgatttttccgcagagtaatacgaaatatagcttaaagacagtaaaccgattgacagcgccgaaagagtcgtaataatcgtcagcagtacggcgttagacttcatccggaacatgatggatgacaaagacagcacttcactgacattcagatacccgccctttgattttctgataaggttagccagaaagctgaccgaacctttataaaacaaataggttccgataatcacagatccgagaataaacaccattgccgaaaacagttcattcatggtcgtaaaactgcccccgaatagttgagcggacaccgcatagcctgcgatgatggccgcaataccgataacgccgattgtcatctgcagccaagagagccgccttatgccgctttctgacgatgacgcagctttaaataaagacaaaatgctttgccgtttaataaataagtaattcatcatcataatcagcacataaacggccccgaacacaatcaacgtctgaacgagcgccctgcttgagaaaaacaaggagacagcggcttttacaccgactgtatggaacagcatcatcatacataatttcgaaagagaaaagccggcaaaaataccgatccatatcgacccgaaatacaaaataaaattttctgtgctgagtatgcggaaaatgtgcattttcgtcatgccgattaatcggaataagccgatttcccggccgcgccgtttaataaaaatagtgttggcgtataaaagaaataccgacacaatcgccacaagcagaatggaggcggcccggatcgccgccgctccttttatggagcttttcatttcatcaagcgccggatcgtattgcattgtgacaaaggcgaaataaagggcggcgctgaacaccagcgcgaaaacgtaaagataatagtttttcatattctttttcaggttctggaagatcaaatgatgaatgctcatgcctgaaccccgcccaacacgctttgtgttttcataatatcctgaaaaaagtccggtctctcctgaccgcctttattcagctgtgtatacacacggccgtctttaatgaaaaccacacgtccggaatagctggcggcaaccggatcatgcgtcaccatcacaatggtggcgcggcgcttctgattcaaacggctcagtttattcagtaaatccgaggcagccttagaatcgagcgctccggtcggctcatcggcaaaaatgatgcccggctcatggataacagctcttgcggcagacgtccgctgtttttgcccgccggaaatttcactcggatacttatgtcttaaatcatagatgccaagctcctctgccgtctcggcaaatcgcagatccgcctcttttttagacattttcgtaatggataacggcaggagtatgttttctttcacggtcagcgtatccaataagttataatcctgaaagataaagccgagatgccgttttctgaattcggcaagctgtttttccttcatggacgtaatctccgtctcattcactttaatggtacccgcgcttactttatcaatggaagaaagcacattcaaaagggtcgttttccctgatcctgacgggcccataatactgacgaattcccctttgtggatctgaagatcaattcctttcagcacctcttgtttattcagcttatttccatagcttttgcgaatattgcctgcttctaaaatcaccacgttacgattctcctttttacattggttatatttattgtaagaacaggagccgtttttttcgtttgattaagcgaacaaaagagaaaagcatgtgacacttttgtcacacgctgaacgtgctgacggcatcgttctgcttcggaaacaccaatgtaaaaaccgtgcctcgtttcggctctgatcgtacactgatgcggatgagaagcgggaccgcagctttttgagccaaatacaggcccatcccggttgacgcgtgatcacggctcattcgcgttgaagtaaaccccttttcaaaaatgcgcggaagatctttaggcttgatgccgatgccgcggtcttcgatatccacatgcacccggccgttgtgttcatagctttttacggtaatatcatccgcttcactgtatttgacggcattgcttaacagctgtctgatgatgaaggacagccatttcccgtcactgagaacgtcttgtgcctcaagctgaatgtcaaacccgattcctttctgtatacaccatgattgcaggtttttaatttcgttgaaaacgagaggacggagctgaacgtgctgaaatgataaatcattttcaataaaggtcaatcgtttctgatgaagctgctggtcaaggagatggtgaatccgcagccattcatactgcaaaggagctttcagtggctgttcatccaagcgttcgatcataaggttcatcgctgtcagcggtgttttgacttcgtgaatccacgacatcagctcatctttctcatgctctgaggccgcctggagatgaagtgagctttttctcaattgctctgtctgcccttcgatgctttcttcaatgatggattcaaacggactgtctggctttttcagataagaaatgtctaaattggcgtcccattctgttaagcttttataaaaagcggtctctttgcgatagcggaacaagagaaacacaagaaacagaagaagcgatagataaatgaaatacagcaccgataaaaacggaatggatggatcaatatatgccgcaaaaaggagcacggcctgctgaaaaagaaacatcgcgatccagctttttctttcaagcagaaatgatttaatcataaagaccgtcttcttccttcgcgatgtacccctgccccactttggtttcaatcatcttcccgatgcctaattgatcaagttttttccgcagccgattgacattcaccgtcagcgtgttatcactgacgaaacgctcatcattccacaagcttctgatgagttcttcgcggctgacgattttatttttctgctcggccagcagttttaaaatcagcatttcgtttttggtcagctcaactgaaccgttttcatggctcaccatgtttgtttcagcatcaatggcagccccgctccaccttttgatgagcgccggttctgcattgtattgatacacccgccgaaacacggcttgtattttagcaatcaagacgtcaaaatgaaaaggcttctgaatgaaatcatctgctccgagctgcatcgacatgaccatatctgcgggatgatcccgcgaggacaaaaacagaatcggcacgtttgattgggagcgtatcattctgcaccaatgaaagccgtcaaatttcggcagctgcacatcaatcatcaccaaatcgggcttgatttcggtaaattcccgggtaacccggctgaaatcctttatcccgtgcaccgcaaatgaccagcccgttaatctctctttcatctcgtgaaacaaagtgttatcatcttctattaacaaaatatgaaacatttgtatacaccctttttctgtctgatagaggaaaaaccggctgttgtgtccagccggttctttctctttacaattctcttcttaacgcggtcagaacgttggtttttgtcgctttccgggccggattcatacccgagatcaccgcgactcccgcacaaatgacaactgcgattacaacgaggctgagcgggatataggagaaggtataatgaagatcttcagctccggtctttccccctaccgctttcaaaataaccggcacagccagattgacggcaaaactcactccgtaggaaataataatcccgatcacagatcctaaaatcccgatataggcgctttccatcagaaacattctgcggatgatggacgggcttgcgccgatcgctttcataatcccgatttcctgcgttctttctgtaaccgccattgtcatcgtgttgaaaataccgatggcagaaatcaagacggcgataaagccgacaaagatcaggccgattttaaagacgaggaaaaatgtgttgacgccctgcagctcggttgtgacggacatgactttataaccgtcatcactcaaatcattcgttaactgttcaacattgtcaaatttgtcggcgtagacttttatgcttttttcagcatttccgcctttcagatctaagaatttcgaaaagtcctttttgaattgatcactgataaaaatatttgtatcctccatccactcttgggacggtttttttgttattccgactaccttaaagtcgtacgttttggttccttccgtttttccggtatcattgttcgtttttgagatgctcagctggatggttttattcagcagatcctccgtatagcctgttggcttttccacatccgagacattgtcttgatgatcctttaattctttgttgtattcatctgcctcttttttcgtccataggttcttcgcgaaattatagccgaccacaatttcattttctgatttggcgactcttccccgatcaagctccatattggctttgacttcgtctttcatgtttgtcagcactatagctgaatcttcatttgttctgtttcccaatgtcgctttattcggttcatacacttgggttctttcaacgacagacttgacattcttatatttttccaagtctgatttctttacggcttttccgttctcctggccgagcacattgatttccgtcacaatctgctggctcatggtaatgtctgtaatcgttttttgaatcccgaatccgacggaggacaagacaactaaaaacgcgcacgccattgtcgtcgccagcaccgtcatgaaaacacgcagccggtttttcttcatatttcttctgataaagtgaacctgatccttaaatctcaactgtaacgcccccttttaatacaccgtcatgcagctggaattttgaatgagcaatggaagcgacttcatcgtcatgcgtaatgatgacaaatgtaattccgcgctcccggttcagctgctgaattaatgcaagcacctcaagctccgtttctgaatcaaggcttcccgtcggctcatcggctaaaataatcgacggatttaaaatcagcgcccttgcgatactgacacgctgctgctgaccgcctgacagctcattcggataatgattcgcatgattttcaagaccgacccgtttcagcatatccgcgactttctgcttgcgttcagaaggttttacgcctttgagggcaagcggcatttcaacattttcataggttgtcagactcggaatgagctgaaaactttgaaaaatgaaaccgaaatgcccaaggcggaactgcgcccactctttttcactgaagcctgtcacatcagtgccgttaatgacgatacggcccttcgtcggtgctatatagccggaaattaaattcagaagcgttgattttccggaaccgctccgcccgacgatacaggcgatttcccctttttcaacggtcaaagagacatccttcagcaccggaaccgcactctctctgcctttcctgccgattttaaatgaatgatcgatatgctgtacatctatcacgtaaaccactcccctttatatttgtttcgtttttttatacatgaagtaataactgatgaaaaacccgataaccgcaccgataagcatgccgaatatgtagccggaatatgaaccgttataagcatatccgcatacacccgcacctcccaacatactgatcaccatgacgagcacttggaagatgcgttctgtatgtttgctcaagataaaatgtccgcttcgttcactcggcattttcaggaaattcacatagccgaaaagatagaaacaaaaacccattaatgcacatataagcaatgcatgtttcatgtaatgaatccatgacgtatggatataagcggccggcatgaaatagatcagaaacccgctccaagggaaatcaatatcccgcacagcctgcttgccaaaaaggaactcagcgtttaatagataaatggtgaaaatcacgattggaaagaaggagatcgtgaacgctgtgatgagctgtgctgctaaattgccagttattgtgccggcagctgtcactaatgcataaatcatcaagctgacgaccagcatccctgcgctgaatgagtgaaaatgatgtacagcgtcaggtttaagcataagaaacaatatgtcagacactccgtaagagacaagctgggaaccggctaacacggctgctcccagtaaaaacttagtatggaatatccggcttctcgaatacggaagacttaatgtatacattttttcagcccgtcctgctcttgtcagaaaaagccccataataaccggaggaatgaaatgcagcccaattacattccgatggctgtaatcaatgctgaatgtacaaactgaacccggatattgatgaagtacactcaaacaatctttataatgaaaatactcatttataattgccaaagggcctatgataagtaagaaccccgcggaaaggagcagcagcgtctgccgctgtttccattctttataaagcaaaccgttaatcggcaccttgccttcccccaaactaaacatgttcatacagacctacatatgctttgttttcctgtaaaccgtaaaataactgatgaaaaatccgataacggcgccgataataatgccggctaaatatccgaacatcgtgtccgtgaccccatatccgaaaactccaaaacccataaccgcaaacgcgattaccaatagctgcaccgggcgttccaattttctccaaagaaagaatctgccgttccgttcattcggatgtttcagaaagctgacgtaaccgatcagataaaagacgacgctcatgactgccggaatgagtaagatcagatgtctctctctgatccagtcgttaaacacatatccaataggtgttacaaatataaaaagacgagattcgatatagctgctgatgaaagagaattcattaccaatactaaaatcgaaaacaacctccaaattcgcggccggcagaccgatgagtaaaaagggcagaatcgttacggtaaacgccgttaacagctgagcgaatatatggcccgtcaatgctccggatgccattaacagtgcgtaagccataaaactgatgacaatcattccgattgaaaaatgatcaaaatcgtacgtatggctcggtttcagcagagaaatcagcaatgacgccgctccgtagcctatcgcctggggaacaacaatgactgccccgccaagccagaatttggtctgaaagatttggcttctgctgtaaggcatgcttaacagggcatccatcgttccctttgtccgctccaagcctaataagaagacagcaatgatgacactcacaacccagttgaaggaaagaagcgacccattcgtataactgacgacgaactcacaatcttgcggagccggatcattcaaacatccctgatatgttacgtaattgttataaaccataaaaggatttgccgctattaaaaaaatactgctcaataaaaacaaccactgatttttcttccattctgtatacaatagcccccgcggtatcattccggtcctcctttcttacacatgcttcgtttttttataaatcgcaaaataactgaccaaaaatccgaccgctcctccgaccagcatcccggccgcataccctgtcatcgtctgtcccgtcgagtaccccgccaggccaaaaccgagaacggcgataatgattaccacaatctgaatgggccggtcaagctgtctccagaggaaaaaacggccgttccgttccacgggctgtctgacatagcaaaagtacccgatggcataaaatataatgctcatcactgccgggatgattaatatatacttgctggcagatacccaattcgtatcaatgtacgtaatcggattcagatattgaaaagaattgtttaggtaagcattgactggcggcatcagctcatgcatgtcgatcccgaagatgacttccgcatttgtcaacggcaacgtaataatcaggtaaggcgctatcgatacagcaaacgccgttaacagctgggcgaacgtattgcccgttaagcagcctgcgctcgcgaccaatgtaaaagccaaaacactcacaatgatctctccaacgctgtaatggtggaagaaatatacgcgttcaggctttaacagaagaatcaacagctcagccagcccgtagccgatgacctgaaagccggcaatgaccgccgctccgagccaatatttagtgtgaaacacctgagcgcgggaataaggcagactgaaaagcgtatcaatcgttccctttgtgcgctccagtccgaataagcaaaccgccaaaatcacagcgggcgcccagttcaagttcagcattctgctctccaaagaattcacataaaacttacaatatgctcccggggtatccagacagccttggtagaccagataggtatttaacacttcaaaaggattgaccgccgctaaaaaaaggccgaccataacgagaacagttcgattctgcatccattccctgtatagcaatccccggtctaccatctccggttccccccaaacttcgcgatgaagacttcttctaagtttacaggaagctcgttccacactttcgggcgcagctcttgcagaaatttctttttcttctcatcgttcttcggaatcagcactgtataaaacacaccggcatggtcgaggatcggtatgttttgttctctgatcatcaagttgacatcctcatcaaacgccatttggattttcatgtaatcctctttcatatcatccaaatccatcacattcgtcagctgatttccttccaaaaatccgatccggttgcacatgcgctcaatatcttctaaacgatgtgaagtaatcagaatgctcgtttcccgttcagccacttcatccaccataagctgaagcacgtcatgacgcgttacagcgtcaatcccatccgtcggttcatccaaaagaatcaatgccggacgtgaagcaaaggcaaggacgagggccagctgttttttcagccctgtggataattcccggtatttcttcgtttccggaatgctgtacctgttcatgagctcattggcgtaagtcacatcaaaattcggatagattctgcttacaatagcaacaagctgtttatatgtatatttgtcataaaaaggattttcaacaggcatataaatgatattctgttttactttcggatgccgctttatttccacctgattaaataaaaccgtcccttgatccggcagcagaatctgctgaatgagccggagcaatgttgttttccctgatccgtttcggccgagcagcccaaaaatttctccttttccgatggtgagcgaaatatccttgagcacttctttaccgtcaatcgtttttgagagattgcgcaattcaatcatgatccctgcctcctttcacatcagcgctgatttcctttatccattcctgcagcttctccagctcaactcccgcgtaatgggcatcgatgatgagctgtttcaattgctcttttatcatcgtcatcttcccttcaaccaatgtcttttttgcattctccgatatatacgttcctcttcccctcagcgtttcaatgacaccatcgcgttcaagctccttgtacgctttgctgactgtattcggattggcgataatgatcgttgccaattccctgacagaaggaagtttatcccccggcttcatgatcccttttaaacaaagctctttcaattgctgtatgatctgctcataaatcggggttgagcttctcggatcgatttgaatcatttacttcccttctttcttttacgagctgctctatttctttaaatgttctgccactgaaaaccgatgacgcaagaatgacaaacagactgctggccaaaaccgaggcggcgataataagaggcacatcttgttttacggatcttttgtttttcatgaaggctctcctttcctatgctcaacatttatatttcgatttcattttttgagtgtttgcagtgtattacatcaagtagtacacgtaatacaataaacacactccgccctattgtcaattcttttttaaaaagaactacaaaaaaacccgccgggattccggcaggttttgcaccatctaaaacggtgcggtcagtaatcgaaattacgctgcaaaatcatattgttttgcagggtctggagctgcaatctcattcggtaaagctgctctctttgctgatcattcgcagataatgacagcttgtttaattcattcaccgcgttttcaagcatcatttgcgcttcactgtactcattatcattataatgctcttgtttggaagcggttttaaattgctcattcgcaaattcatacgcctgttcgcttctttggagatgttcatctactgattgtcttgttgccaacgaaacccctcctcagtgaatgggaaatcaaacttagtttgagcggaggaaaaatgattaacacccgaagattgcaggaaagagaaccaaattttccgtgagtcaggaaaaggaatgagaatcctgcccgcagttatactaaacaaaagaaagccgcatctgttttcacattgtgaacccccatcattcatgctacaattttaggatgcatctgatgtgagggaggctttttgaacattgaacgagaataacccttttccttattcaaatacggaaaaacggtaccatacattaaattatcatctgcgggagcatttcgggcataaagtgtttaaagtcgcgcttgacggcggttttgactgcccgaatcgggacggcacggttgcacacggcggatgcacattctgcagtgcggccggatctggcgattttgccggcaaccgggccgatgacttaatcacgcaatttcacgatatcaaaaaccgcatgcacgaaaagtggaaagacggcaaatatatcgcatatttccaagcgttcacgaatacacatgcgccggtggaggagctgcgtgagaaatttgaatccgtactcaagcttgacggtgttgtcggcatgtctatcgcgacccgtccggactgcctgccggatgatgtcgtggagtatttggccgagctgaatgaacggacatatttgtgggttgagctcgggctgcagaccgtacatgagcggaccgcccttctgatcaaccgcgcccatgattttgactgctatgttgagggcgtcaataaactgagaaaacacggcatccgtgtttgttcccatatcattaacgggcttccgctcgaaaacagggacatgatgatggagacggccaaagccgtcgctgatttggatgttcaaggcattaagattcacctgcttcacttattaaaaggcacaccgatggtgaagcaatatgaaaaaggaaagcttgaattcctttcgcaggaagaatatgtccagcttgtatgtgatcagctcgaaatcattcccccggaaatgatcgttcaccgcattacgggggacgggccgatcgaattaatggtcgggccgatgtggagcgtcaataagtgggaagtactgggcgccattcaaaaagagctggaaacacggggaagctatcaaggaaagctcttcagaaaaatcggggaggagactgccctatgaccttgatgcacatcctccctttcagtaaagaattgctgaagtccgccgcacaagaaggagatatcacggttgacgcgacaatgggcaacgggcatgatacatattttctggccggccttgtcggtgagacaggacatgtccatgcctttgatattcaggctgatgcactcgccaaaacgaaggagcgtctcggtgacgccctcagcccgcgcgtcacgctgcaccataagagccatgatcaaataaaggcatccctgcctgaggatgcgcacggccgtgtggcttgtgccgtgtttaatctcggctatctgcccggcggcgataaaagcattacgacaaacgggcactctaccatttctgcaatcgaacagctccttgaactgctgaaagagaacgggctgatcgttctcgtggtctaccacgggcatcctgagggaaagacggaaaagaatgcgcttctggaatattgcgaaaaccttgatcaggaaaaggcgcgcgtgctgagctacggctttctcaaccagcgaaacgacccgccgtttattatagcaattgaaaagaaatctcctggtaaataaagaatcggcctgtcatcaacaggccgattctttttgtgaacgtatttactttttcaaaaaagtcaattaccatgaaataatgggaaaaagttcatttttccactgaaacacctgagaggagcagcagtttgaatattcttcgcatcattttttcaagtgttccctacgtgatgttcatcatcattttatcaagacatttaggatttgagttcgcgaaaacctattactggtggtttgctgcatttttcgtcatcgggctggtcggcaaatttgtaatgcactttgcggaaaaaaagaaaccattaaaaaaagagacagcgtaaattgcgcatgtctctttttaatgggcactgttcatccattacgagcttttcgtccaagccatcttctgaaatttgcggtaggctcttccgttgatataaaagaaaaatgacgtttttccgcttgccctgatcagctttcgcgcgaggcggcccatttctttttggctggcgactttgtcatcggataaatagacgccgagcagcccccggttaatcagccggtgaaaattttcatgcggaatgccgtgcaaatgttcatccgctttttcaataaaatgcttcagtctctgcatcatttcttcatgagattgataatacgtacagaaattcagatcgccttcaagcagatcctcttcctggtctattaaataatcgagcagaatgtgcagcccttgtatgtacggaaaataactgctgcggattttctcagcggtatgttcgttgaaatcaggctggaaagagtaagcgacgagacagaaaatgcctaacgtcgatcctgcgcaagcagagaattcaaaccactccatttccggaagctgtgaccggtactgctcaaaccagcttttaagcctcggaacgcgttcatgctcaacgacatgcttatgcacctgaagatcgcaataataatcgcacagctcgagcaaataaggtttaatgatgccgtaatgttctattgacccgagcacccgctggcatgttctgaccagctcatgaagataaccgccgtcatcctgctcctctctgtactgatagtacggctgcacctcggcaccgactgtcagcgcgtcacgcatcgaaaggtgaagcatgcggaaatcttccggatcaagcgatgtgctgcggtcacacagattgtccagataatcactgatcgtctggtacgcaatgataaattgcacgcatttctgtttttgctctcccgacagcagggctaaaatgccgccgccctcacaatgaaacgatttatcacggatacttgcggccgcctgctcccgcagctcggtatttttaatggaatctgatttttcccgccatatattcaattcctgatgtacgagcggaaaaatttcacgatacacttttgccataaggttaaaaggatgttccggtactgtcaacaaatgcacccccagcgaattcaaatatactgatctgtaaaggctttcgccgccttaaacacagcttctctttccggttcattaaaaatttcatgataaagcccttcccattcccggtatgatttattatgggaagccacaccggaaaaccatttacggaccttcattttatcaacgattttgtcatcaccgccctgcataagcaaaagcggcacttttaaaaacgcatcagtcggcaccatagcggcatcaatggtttttaaaagctctctgtaccatcttacagatactttcgtgacatataaagaatcgttttgatccgcttcaatcatatccgcattccttgtcgccatatcaggcgataaaccggagtccactctgagggacggggcgagaacattcagtcctttagacgcaaaatcaagcactttattgacttttatttgcagcccaagacaaggtgatgataaaatgagtgccgtaatgcggggatttctctgctgcttaaaccattctatcgcaatcagtccgcccatgctgtggcccaaaaggaaaacgggcgattcaagcgttctcgcttgatcaatccatatatctacttcatcaatgtattcttggaaagagcgaatatgccctctggcgcgggtggatgttccctgaccgggcaaatcacccatcaccacgttatatccggaagatctccacatttcaacgagccatttataacgcccgtggtattcgcttgccccgtggattatgacaatggtaccgacgggcctgtctgctttccaagtccacatgctgttcacctcttacataaatttagagaaagaaggatgagacatgataatctacccttataaagaatttacgccggacatacatcctgaagcgtttattgcggataacgccgtcattacgggcgacgtcgtgatcggagaacaatcaagcatttggttctcagccgtcatccgcggggatgttgcgccgacaagaatcggaaaaagagtcagcatacaagacttgagctgtctgcatcaaagtccgggccgcccgcttcttattgaagatgacgtcacgatcggccatcaggttacactgcacagcgcaatcatcagaaagaatgctttaatcggtatgggctccgtcattctggacggggcagaaatcggagaaggcgcgtttatcggcgccggaagtctcgttcctcccggcaaatccattccgcccggctttcttgcgttcggccgccctgcaaaggtcatccgccggctgacagaagaagatgtacgggacatggaaagaatcagaacggaatatgttgaaaaaggccgatactataaagcactgcaagagaaataaaaaagatcagctttgttttactactgtaccatttttcaaaatattatttaagcaaaaaccatttgcgttctgctggttgtcagaaaacagaagcaaaatgttcaggaatttgttttattcttccccctttgacccgatcctatgaaaaaagagcccatttcagcgggctcttttttttacgctttttcggcaaatgtctgtccgttttccagatttatgtgttttcttttatggaagcctttcccgtaataggctgctaataatatgcagaaccaggcagggccgatgatgacggccactcgggtctctgcattaaaagccatcagtacaacgacaaaagcgagaaatgccagtgagatataagaggaaaagggatataaaggcattttatatttcagtttttttcgttcttccggctgtaagcttttacgatatttcatttgagaaagcaaaataatcgcccacgtccaaatcgctccgaacgtcgcaatgcttgtcacccatgtaaacactttcgccggcaccacgtagttcaacagaacgccgatgcataacgcacccgctgaaaccaataccgcttttcccggcaccccgccttttgtgaccgtgccgtaggttttaggggcttcattttgctcggccagattaaacagcatgcgtcctgtgctgaagatcccgctgttgcaggacgaaagagccgccgtcaaaacgacaaaattaatgattccggccgctgcggggattccgattttttcaaatgtcaaaacaaacgggcttccgcctgaaccgatctcctgccacggataaattgacataatgacaaacaaagctccgacgtaaaaaatgagaatgcgccaaaaaacagtatcaatggcgcgtgccagtgatttttccgggtttttgacctcaccggctgtgacaccaatcagctcaatcccgagatatgcaaacatgaccatctgcagcgacagcagcacccctttaatcccattcgggaaaaagccgccgtggctccataaattgctgatcccgagcgcaacgcctccgtttccgagaccgaatacgatcatcacaaggccgatcgcaatcattgacagaatcgccaggactttaatgagcgcaaaccagaattcaagctcaccgtatgctttgaccgccagaaagttgacagccgtcataatgacgagtgcacaaagcgcccagatccatgacggcacgtcagggaaccagtagcccatataaatgccgaccgcggtgatttccgccatgcaggtaacgacccataaaaaccaataattccagcccgttaaaaatcccgccagcgggccgagataatctctggcataccggctgaatgagccggccacaggcttttgaatcgccatttcccctaatgcccgcataataaaaaacataatcagcccgctgcaggcgtaagctgctaaaatccccggtccggcaagctttatggccgaagctgacccgagaaacagcccgactcctatcgcggctcccaaagacataagcgagatatgccgctcttccaagccgcggtgaagcgtttttcctttgttttgcataactctccctccccctgattttgacagaaaaaacaaaccgagacgaaatagccagaaaacactctccggaatctgtccgatagtcctataataacatttttctgaatattgcgtaacactttgcggaaaacatagcggaatagaaggtttataaaaaacaatagaaaaaaggctttcgataacatcgaaagccttttggattaaacgaagatgacttctttcggctgatgattcagctcttccggcaccagtcttttttcgacattgatgctgtgccagatcatgaagatcagcacggtccagattttgcggctgttatccgctctgtcggcacaatgatcttcaagaagctgaaggacataatccttttcaatataagcgtctgtttcgctttcatggatgatgttgcgcacccattcgttcatttcatttttcagccagtggcggatcggcacagggaaaccgagttttttacggttaagcacatgatcaggcactaccccttcagcggctttacgcaggaggtatttcgtcgtgccgtttttcgttttcaattcatccggaattttagaggccacgtcaaacacgactttatcaaggaacggcacgcgcagttccaatgagttggccatcgtcattttgtcagcctttaacagaatgtcgccgcgcatccacgtatgaatgtcgacatactgcattttattaatgtcactgtatgaacggctttccgtaaagtacggcttcgtgacatcacggtatgaaagctctgaattgtaatgtttaagcagctgttttttcacaggctcttcaaaaatcttcgcatttccgatatagcgctcctcaagcggtgtgcagccgcggactaagaggcttttccctctcattccttctggcatgaccgacgccacgtgaagaagcatttttttcagtccggacggaatgcgttcaaacggtttaagcgacagcggttcacggtaaatattgtacccgccgaacagctcgtccgcgccttccccggataacgcaaccgttacatgttttttcgcttctttcgcgacaaagtacaaaggaatcgccgccggatctgcaagcgggtcatcaaagtgccagacgattttcggaagctcgttcatatactcctctggagaaatgactttgctgatattttcaatcccgagcgcggcagctgtttccttcgctacatcaacttcactgaagccctgctgctcgaagccgacagaaaatgttttcaggttcgggtgaaattctttcgcaactgagacgataaaagaagagtcaataccgcctgataggaacgagccgacgggaacgtcacttctcatgtggactttgacagagtcaaagattgcgtctctgacttctttcaccaatttatcttcatcagactgaacgggcttaaagttcgctttgaagtacgttttaaacgcgatatcgccttccgggcggatcgtaaactggctgcccggctcgacttttttcacttcagcgtcaagcgtgctcggttcaggaacgaattggaaagacatatattgctgtaaagaagctgtatcaagatcaataccgttttgagcggccattaaactttttctttcagaagcaaaatacactttgtccccgatggttgtgtaatacagcggtttaattccgaacgggtctctcgcgccgtacatgacacggtcagctttgttccagattaaaaacgcaaacattccgcgaagctttgaagcagcttcttctttataatggcggtatgtcgcaaggagcacctcggtatcggaatctgtattgaacttgtagcctttcgcttcaagctcttctctcaattcaatgtagttatagatttcgccgttaaaaatgatccaatatttttcgtcttcatatgataaaggctgtccgccgttttctacgtcaataatactgagccgtctgaagccgaaaccgacgtgctcgtcatgataatacccatcgctgtcaggaccgcggtgaacgatcatttgattcatttgtttgattagctcttcttgatctgcggtttgagttaatggatgcttattaaaaacaccgacaaatccacacatagtatagcctccataagtgtaattttctaattggaccccctttttatagacgctttgttacgccattggtttcacgctatgtaaaaaatcagcatggcagcatctgcaaaaagggaaagccgcttaagtaagcggctataaaattattctcctagtgcttctttgcgaagcgcatccgccttgtcagtacgctcccaaggaagatccacatcatggcgtccgaagtggccgtaagcagcagtctgcttatagatcgggcggcgcaaatcaagcattttaataatgccggcaggtctcaggtcgaagttattccgtacgacttcgatcagtttctcttcagaagcttttcctgtatcaaacgtattgatggaaatagaaacaggctgtgccacgccgattgcgtatgcaagctgcacttcacaagaatcagcaaggcctgctgccacgatgtttttcgctacgtatctcgcagcgtatgccgctgaacggtctaccttcgtcgcatccttaccggagaacgcgccgccgccgtggcgtgcatatccgccgtatgtgtcaacgatgattttacggcctgtaagccccgcatcaccttgcggaccgccgattacgaaacgtcccgtagggttgatgaagtattttgtctcttcatcgatcagttcctcaggcacgacagggttaatgacatgctctttcagattgcgctgaatctgctcaagcgtaatttccggatggtgctgagttgagatgacgatcgcatcgatgcggacaggtttgttgttttcatcatattcaacggtaacttgcgtttttccgtcagggcgaaggtacggaagaatgtcttctttgcggacttcgctcagacggcgggctaatttatgcgccagtgagatcggaagcggcataagctctttcgtttcgttacacgcataaccgaacatcagaccttggtcccccgctccgatcgcttcgatttcagcgtcgctcattgtgccttcacgcgcttcaagagcctgatcgacacccatcgcgatatccgcagactgttcatcaattgatgttaaaacagcgcaagtctccgcatcaaatccgtatttagcccgtgtgtagccgatttctttaatcgtttcacggactgttttcggaatgtcaacgtatgttgatgttgtaatctctccgcttaccagcacaagacctgttgttacagacgtttcgcaggctacgcgcgcgttcgggtcattttttaaaatctcatctaagatactgtcagaaatttggtcacagattttatccggatgaccctcggtaacagattcagatgtaaatagtcgacggtttttactcatttacttttcctcctgaaaaaagatcttttgcaagaccttttcatatgatacggaactcgctccctcttaatacaatgtcatactatatcagagaatgttaattggcatattttatgaaataaaaaaaccttttccactcgaggaaagggtttggtctgtgtgcctttcactcttatcgctcaaggaaatattaaaccttgcatcaggttagcaccttggtttcccacagtgttttcacctgcttttttacagagaaaccggttgctgggcttcatcgggcctgtccctccgccagctcgggataagagtatccgctcaatgaaatatcttatcgtaaaagggcggaaagtgtcaatatgaattaaagcgattacgcgcctttatttcgggaagcaatggaaaaaacacaaacaaaaaataataaatagtatagactatttttatatatatgttatactaattccacattcagcgaaatacaaataaaccggcaaaggaaggtttttatgaaattagttgatttaaccgcagatcttcaagcgttactcgcaagtccgaatgtgcatcataatttatcagctccaaaacttactgaaaaagtgatcagccgaaatgaaggaacgctgacatcaacaggcgccgtacgcgccactaccggcgcatatacgggccgatcacctaaagataaatttatcgttcgtgaaaaaagcacagaaaatcaaattgattggggcgcggtgaaccagcccatttctgaagaagcgtttgaaaagctgtacgccaaagtcgtcagctacttaaaacagagagatgaactgtttgtttttgaaggattcgcaggcgcagatgaaaaatacagactgccgattacagtcgtaaatgaatttgcgtggcataatttattcgcgcgccagctgtttatcagaccggagacgaatgaaaaagatccgcaagcacagccgtttaccattctttcagctccgcattttaaagctgatccggaaacggacggcacgcattctgaaacatttattattgtatccttcgaaaagcgcgtcattttaatcggcggcaccgagtacgccggagaaatgaaaaaatcaatattctcgattatgaactttctgctcccgcagcaggatattctgccgatgcactgctcagccaacgtcggtgaaaaaggcgatgtcgccctgtttttcggtctttccggcactgggaaaacgacgctttcagccgatgcggaccggaaactgatcggcgatgacgagcacggctggtctgattccggcgtttttaacattgaaggcggatgttacgctaaatgtatcaatctgagcgaagaaaaagaaccgcagatttttcacgcgatccgcttcgggtctgttcttgagaatgttgtgcttgatgagaaaacgggtgaggcggattacgacaattccttctacacggaaaacacaagagccgcatatccgattgagatgatcggcaatatcgtgcagcctagcattgccggccacccgcaggcgatcgtctttttaacggcggatgcattcggtgtgctccctccgatcagcaaactgacgaaggagcaggcgatgtatcatttcttaagcgggtacaccagcaaacttgccggaaccgaacgcggtgtgacatctccgcaaacgactttttccacgtgcttcggttcaccgttcctgccgcttccggctcacgtatatgccgaaatgctcgggaagaaaatcgacgaacacggcgttcaagtctttctggtcaacacaggctggaccggcggagggtacggagtcggagagcggatgaaactttcgtatacaagagcgatggtcaaagccgcaattgacggcacgcttgatcagacagacatgacagcagacagcattttcggtctgcacagccccgttcatgttccgggcgttccggatgaggttcttcagcctgaaaacacatggagcgataaaaaagcatacaacgaaaaagcgctgtttttagccaatgagttcaaagaaaactttaaaaagttttcccatgcagactccattgccaaagccggcggacctctcgtttaaccaaaaaagccaagggcgtatatgccctcggcttttgttttttcaatttgtcgaatgaagcgaagtgagtctgtatgtaatgcttgtccggccgttcgcccactcgagcttttggacttcacccgtgccggatttctcgccgttttttgttttgcgcacgtccatcggaatatcgagaggatagacccgatagccctctttctctaataaaaagatattttcctctatccgtttttcattgcctttagtcacaatcatagtattaaattctacaggcattcccaaaatgaaaatcccctttcattctctttttctatattatcatatcataaatccggcatcttaccttgtcttcatccattccgccagacgccggacaatgcgtctgttttcctgcgggggaaaataatgcgtaaaaccgctgtaataccaggtctccaccggtttccccgtctctttcagcttgtcctcaatcatcctggcgtgctcgatcgagacattttcatcattctcgccatggatgagcagcacaggcgcctgaatgcggtctgctttttcaaacggcgaacgccatctgtattcatccggcacctttttcggcgtgccgccgatcacccgcttcatcatccgccgcaaatccttccgctcttcataagtgagcgccatgtcactcacaccgccccaggaaacgagcgaagccgcttgatgccccatctcgatcgcagtcaaaagacccatgattccgccccgggaaaatccgaaaatatgaatccgcccttccctgacgttcggatgctcctgaagcagacggaaagccgaaaacgcgtcctctctgtcctctcccgcaaaatcttcattcccctcgccgccctgattgcctctgtaataaggcgcaaacacgacaaagccttgggaagcgaattgaacgattcttcccggacgaaccatgccgacatttttaataccgccgcgcaaatataaaaaaccgtcgtatgttcccggcgccgcaggctcggcaaggagcccctttaccttcagcccttctgactcatagcacaccgtaaagaggcggacatgcggactcggagacggaaaccttttcttttcaacaagcaaaacaaatgagcctccttccatcatcagttttttattctttcccaacctgaatatgggcactcacacattttttatacccatcatacgatatgtaaagcaaaaaaggttaatttaacgcttaaaacaaggaggttacaccgtgaacaaatggctcaaaacgagctgcgtctttgtcatatgctcctttttcctgctcattcttccggcctgccgacaggaagaaagtctgacgaaggtaaaggtggcggaagtcacacactccatcttctatacccctatgtatgtcgctgaagcgaaaggtttctttaaaaaagaagggcttcacgtttcacttcaaaccacatggggcggagacaaaacgatgacatcgcttttgtcaaacggctctgatatcgcgctggtcggttctgaaacgtccatttacgtggaagcgcaaggagcaaaagatcctatcatcaacttcgcgcagctgacacagacagacggtacatttctcgtggcgcgaaaggatgtgacatcattcaagtgggacgatttaaaaggaaaaacatttctcggccagcgtaaaggcggcatgccccaaatggccggtgagtacgtcctgaagaagcatcacatacagccgaaaaaagacattaacctgattcagaacattgatttcgccaatatttccaacgcattcgcatccggaaccggtgattatgtccagctgtttgaaccgacggcatcccaatttgaaaaagaaggcatcggccatatcgtcgcatccttcggagaagcttccggccaagtgccttacacaacctttatggcaaaagaaagctatttaaaaaacaatgaaaaaacggcggaaaaattcacccgcgccatctaccgcgcccagcaatgggtggaaagccatccggccaaagacatcgcaaaaacgattcaaaaggaatttgccgataccgaccctgccattattgaagcatcgatagaccgttataaaaaacaaaaatcattctcttctgaccccgttctgcaagaagatgaatgggaacagcttcaatctattatggatgaagccggggagctcccgaaacatattccgtacagcaaactcgtcaacacaaaaatcgccaaaaaagtcacctcagaacaataggaggaacatgaatgtcttttttacatgtggatcatgtgacacatacttatttctcgctgaaagaaaaaacaaccgccgtgaaagatatacatcttcatattgaaaaaggggatttcatctcctttctcggaccgagcggatgcggtaaaacaacactcctatccattcttgccggccttattgcccctgcacaaggccgggtgctgattgaaggcagcgtgccgaaccataaagaacaccaaatcggctatatgcttcagcaggattatttatttccttggaaatcaattgaggaaaacgtgctgctcggtttacacatttccaaaacattaacagaagaaaagaaagctgaagttctcggccttctgcctaagctcggattaatcggcgtcgaaaaaaaatatccgaaagagctgtcagggggaatgcggcagcgggcggcacttgccagaacgcttgccccggacccgggcctgctgcttcttgatgagccgttttcggcgctggactttcaaacgaagctttctttagaaaaccttgtcttcagaacattaaaggattttcaaaaaacagccgtgctcgtcacccacgatatcggtgaagccatcgcgatgagcgatacgatctatttattttcgaatcagccgggaacgatccaccaaattttcaccgtgcctaaggagctcgccgccttagatccgtttgacgcgcgtcaggacccggcctttcagccgctgtttcaaaccatatggaaggagctgaattcccttgaaaaacagcagcggcacgattgaagagcttcatcagcagtttaagaaaaaacaccaaaaagaaaaacgccggattcgtgcgtatcaggccgccatttttatcgtattttttgcagggtgggaaatatcgagcaaagcgggctggatcgatccgttaattttcagctccccctctgccgtttgcaggctcttagttgaaaagattgcggacggatccctcgcggcgcacatcggtgtcacattaggcgaaaccgttctcggctttttgctcggcacccttctcggcacatgtctcgccgctctgttatggtggtcaaacaggctcgcccggattttagacccgtacctcgtcattttaaacgcgatgccgaaggtcgcactcggaccgattctcatcgtcgcactcggaccgaattttacaagtatcgtagccatgggagcagtcatcagtgtcattatcacgacaatcgtcgtctttacggcttttcaggaagtggatgaaaattatattaaggtcatgaaaacatttggagcgaaaaggcgcatcatgtttaaagaagtcattctgccggcgtgtgcccccgccattgtttctgcgcttaaagtgaatgtcggtttatcctgggtcggtgtcattgtcggcgagtttctcgtttccgaaaaaggtttaggctacatgatcatatacggatttcaagtcttcaatttcacccttgtatttttaagccttctgatcatcgcgatttttgcgacattaatgtatcagggagtggaactgttagagagaaaatggacgaaaggaaaaatataaaaaagacccgtgcggaaacgccgggtcttcgtttctatgattgaaatacgccatcttctttcagctttttcaggcttatcggaagcaccgaatctttcataatgaaactgaactttttatttcgcgggagattctccggcagttcgctgaacagcaccggcccctttgtttcaaaataatcagcctgtttttcaagcttttcaatatcggcaaaataaatattcttaacgattaccttttccctgccgagcactttatactgtccgacgtactgaaggtgtcttaccgcggcgccggtctcttcttttacctcgcgcagggccgcttcctccgcacattccatcggctccacttttccgcccggaaattcaaacccccggtcttcgtgctcagtcaaaagccacttgtcaccatatcggcatatgacccatacgtgcttcgggctgtctgaaaaaggctggtgttcaaaggagagctgaacagtgttctgataatagtctttaaactcgtacatgtttatccctctaatccgttccttcgtatcttccatacatcataccacagttgcgtttgttcggaagccctttatcaaaaattcagaggaaaaccatcatacccgctagtatagcctcctatgaagcaaatgttacggtttgcgcttgaatttatttttcagggtgtccaaaaggtcgacgagcacctgcggaaccgggatgcccagcgagcttgccgtaatcacaatctgtatcgattcgtataaaatataaaacatgatagccaaattgcggatggagccttcggtatgaagcagctgatcaaaaaaatggcaaactgagactaatgacaaggtcacgatttttttgaccagccgcgcaaaaagcttttttgggctcagctgttgcaaaagagattcctttaagcttgtactgataaattcgatcgccatgaccgatagcaaaatcagaaacgaatactgaaaaccgccgaagaaaaatcccgctgccgacacgatcactgcaaaaaacgaaaagatgccaaagtctctgcccacttgatccaacatcctttcacagaaacggccttacattattctatgaaaggtgaatagaacggactggatttttcagaaaaatggacaaccaaataaaagaccggatgctctaaagccccggccttcccttgttaattatcctaaatacgctttcagcatccagttatgtttttcgatattctggtgaatggcaagcagcatatctccggtcgtttcgtcaccgacttcatctgcgagatccattccgcttttcagttcctctgcaatgacagtgaagtcatcataaatgttctgtaccatttgttctgcgctctcattgccttccgcttcttttatagatgcagtcttcaatgattccgtcattgtgccgatcggcttgccgtttaatgccagcagacgctctgccaagtcatcaatatatgtagccgtttcgttatacagctcctcgaacttttcatgcagtgtaaaaaagtccttccctttgacgtaccaatgatagttatgtaatttcacatacatgaccgtccagtttgcaacttgtttattgactgcttccaatagtttttctgacatgcctatcttcctcctttggtttactattgatataccctttatatcgtttgttaaaacataaatttttagcccttgattttacgtctggaaaatatgttattatttgttaaaaaggagggatttcatgctgcttcttctgagtctcggctttcttatcgtgcttgccgtgctgcttttatccatctggtcgaccgtaagagcctataatgtaaagcatacgattgatccgccgcaggacgaatcaaacggcttgacgcacaaaaacaaaccttaatgatgatgcgtctgttcctcatggccggaggaatcatcggcagcttcagcatctccgacacgcacttttacagtcggcatattgtgctgctgttttgccgttacgtgggattgaacggtatacacaccctcttcgtcaaattcagtccgcagatgatacgcccctttttcctccttggccttgcttgttttgctgctgcctttttttccttctttccatacttcaaacatgacttcatccgcatccgtgacgcgctttccgccgtaaaaaacatccgccttgtattctgctttttcatgcggctttaccgtttccggtcccgtaagcttgacctcaagcgctttaggcttttcatccgcggaggttttgtccgaattgcccccgcaagaagataaaagaaataccataccgcacatacctgccaatacagcccgtttcattccatcactccctcgtgtttgcttctattttagcaaacgcttacacataaggtgtgacattttttagaaatatgtaaaaaaagcctttttgcatgacagcaaaaaggcctgtttttttatccgaacactttcagcaaatcttctttatcctgtgacagccagaaacgcattaggcgtttcgcgccttccaaatcatgaagtttcgcctggccgcactgtttttcgttggctgccggaatctccgtaatatcgatggcttctttcagtgtagcgtcaagcaggtcaacaatctcttccgctgtcggctcaccgctcacaaccagataatatcctgtctggcagcccattggtgaaatatctatgatgtcgaagtgattgtatttctcagaatgtgtgcggatcgtaaacgcaagcaagtgctcaagcgtatgaatcgtatccggcttcatcgcctgtttgttcggctggcagaagcggatgtcaaacttattcacgacgccgtctgttccgactttatgcactccgcaatgtcttacatacggagccacaaccgcgttatggtcaagctcaaaactttctactgaaggcataatggcactccctttttttcagaatatgcacccattataacacagttttccgataagaattgcggcggacgcttttcaatctgaaattttttttctatactagcatcagaaaggtggtttttttgatgaaaaccataatgattgcgttaatccgcggataccagaagttcatctctccgctgacgccgccgtcatgccgcttttatccgacgtgttcgcagtacggaatcgaggccgtcaagactcacggcgcactaaaaggcggatggctgacactgaagcgaattttaaggtgccatccttttcatccgggcggggttgatcccgtaccggaaaaaaaacaaaagcattagtccatatgctgatagccgtcgatcaccagatcaagcttgccggtttcaggatcaatcacaagaccgtgcaccggcacgttatcagggaatagaggatggtgtttaatgacgtttacgctgtctgtaacactcgcttctacagaatcaaagcttttcagccattgatcaagatcaacacctgagtacttcagcatgtcaatccgctctttcggaataccgcggtcaataattttaccgagcatatcctcgctgttgattttgctcataccgcaatcatgatgcccgataacgcagacttcatcagcgtttaattcgtatacggccactaaaaggctgcgcataatgcttccgaatgggtgggcgacaagcgcgccggcacttttaataattttcacatcgccgtttcgcatgttcatcgcatgcggaagcaattcaacaaggcgtgtgtccatgcaggacaaaatcgccatctttttatccgggaatttagatgtttggtatttttcatactctttgtttttagtaaactgctcattaaatgtcatgatatcgtttagaagactcatcttggtgtttcctttctgcttttttattcacaatataacataaagcgggtcctttcgtcactccccgctcttgatgacaaagttgcagacggctcaaaaaataagacaaaccccctcgggcttgtcttatttccccatattgtattttttgttgaactgttcgactctcccgcctttttcgttgaacttttggcggcctgtataaaacggatgcgtatctgagctgacttctactttaatcagcgggtatgtttttccgtcttcccactctgctgtttcctctgatgttttcgttgaatggcttaaaaaccggtagccgctgttcacatcttgaaaaatcacttgatggttatccggatgaatatcttttttcatgctgatctccctttctttaaatcgtaattattacgctttattctaaaccttaaataggcgcttgtcaatcatatatgccccgatcccttgatttctaaaccctgcacatatatggaatcagaagaataatttaatggcttcagcaaataatataaccacattacataaaacggtaattagaaaggcggtttatgacgtggatgatttagtattagccagaagcctgttcgggacaaccatgggctttcatattattttcgcgacgcttggtgtcggtttgcctctgatgattttaatggctgaattaatttatcaaaaaacaaaagatccgcattatgccattatggcgaaaagatggacaaaggcgcaggctgttctgctcggcgtggcgataccgaccggaacgatcgcgggtacacagcttgcccttttgtggcccggattcatggaagtcatcggcagagtgatgtcacttccgtttcaaattgaaatttatgctttctttatcgaagcgctgtttatgtccatttatgtctatgccgctgaccggctgactccggcgatgcgcatcattgccgtcattttcgttttgatcggcgccgcggcatctgccgtcttaatcacaaatgttcacgcatttgaaggaacgccggccggctttaaaattttaaacggcaaaatcactgacgtcgaaccgtgggcggcattttttaatccaagctttttcaccaccgcgggccatgtcgttctgacggctttcatgaccggtgcatttatcgtcgcgtcagtagccgcttataaaatgctgagaacgagaaaacaggagcaggtataccgttttcaccggaaagcgcttctgctcgctttaacgatcggcggaatcttttctattattgcctctttaaacggacacgagtcagctcagctcctttacgaataccagcctgagaagcttgcgggcgcagaagggctgtttgaaacaaggtcacacgctccgcttgcgatcggcggttttaccgacgcaaaagaagaaaaagtaaaatgggcgatagaagtgccgtgggctttaagctttttggctgcaaacagctttgacacagtcgtcaaaggcttgaacgcgtttccgaaagacgagtggccgcctttattcatccatacactgtttaacggaatggtcggcatcggaatgctgctcattttgtactccgtcatcggcatcgtgtggagaaaaatattaaagaaagacagctttccgacttggcttttgattttatttttaaccgcgggaccgcttagtctgatcggcattgaattcggatggatattcgcttgtactgggcggcagccatgggtgatttatcatcttctgaaaacgtcagatgtcgtcacgacaactggttcaatcggtttgctgttcatcctgtttacggtggtttacgccattttggcggccgcagtcatttatgtgctgctgtattatttccgcaaacatcccgttgaggaggatgtaaaagcggcggaatcttaacaacagaaagggctgaattgaaatggacattaccatggatgctctcatcgcgatatccatcgtatggggcttcgtgtttatctacgcggttatggcaacgatggacttcggagccggtttttggtctatgatttatttaaataaagaacaaacaaaggcgactaacatcgccaaccgttatttatccccgacatgggaagtgaccaatgtctttatcgtcgcgatcgttgtcgcccttttcagtttctttcccggggcaactttcgtgctgggtaccgttttattgattccggggagtatcattttgctgcttttagctatccgaagcggctttctcgttttctccaatacggcgaaagaaagaaaaatcatgagatatatctccggaatttcaggcttcattattcctgctgtgctgattttggtacttccggtgacacacggaggatttatcgagaaaacgggcggggtgtatcacttgaatttggcaaatgtctttacaagcccgaatgcgtatgcctttatcggctttgccattttaagcactttatttttatcttcgctgcttctggccgacttttcaaatgttgcggaagaggagcatgcgtatcgcatatacagacggagctctttaataacagggccgctgtctcttctttttgcgatcttcattatgctgacattgcgtacggaagccggctggctgtatacgggaatgatgaaagacctgacatggctcatcctgtctgtcattacatttatcattgccggtatcgctctgtttttgccgaataaacgcttcggcagaaacctcggcaaaccgaggatcgccatgattgccattgcgctgcaatactttctggcaagctatgcgtacggacgggctcatcttccttatatgatttatcccgacattacggtcatgtcaggatttacggaacccgcaaccttcagggcgctgtttatgacgtatatcgtcgcgttcatcattttgtttcccggattttatttcttctggaagctctttatgaaagacagacgttatatccgccaggaggaataacaaaaatcggggcggctcatactaatggcgtaccttttatttgggaggggaatcagcatggaccaaaaaattctgtgtgaagtcaataactgctcatattggggcaaaggaaacaaatgcacggccgacgctatttatgttgtcagccatacaggcgaaaccgctgaaaaaagtgaagaaacggattgcaaaacctttaaaccgcatgatttataaaaaaaagagctgtttttatacagctctttttaatttccgcgccgcactgctcacatttatcaagtaaaaaaaccggctttaacagccggttcaaacggggaaggggtgatgatgaacagtttcaatataacagcggcatacagaatgctcaacttgctgaaatatcgttttatcagctgtttgtcgtaaaaacgtccatttgggtgacgtattttctcattatttcctgattaacttcgacacccagcccgggaccgtccggaacagagataaatccctcttcgatacggatgtcaggagtgataatatcctcctcccagtatcggtctgatgaggaaatgtcccccggtatcgtaaattgcggcagcgaagcaagcgccactgtctgcgctctcgaaatgccggtctcaaacattccgccgcaccataccggcatgtgatgctctctgcataaatcatgtatttttaaagcctctgtcagaccacctacacgcgccggttttatattaatgattttacagcttccaagctcaatcgcacgcctcgcgtcatcaaatgagcatatgctttcatcaagacatatcgccgttctcaagtgtttttgcaggtggcggtgatcgacaatatcatctgcctgaagcggctgttctatcatcattaattggaattcatccaattctttcagcctgctgatgtctttcagttcatacgctgagttggcatccgccatgagcggtacattcggaaaacggctgcggatggctctgaccaaatcaacgtcattgccgggctgaatttttatttttatacgttgataaccttcttttacgtattgctcaatttcccgaagcatctcatcagccgaagcaagacccactacgacgccggcgggcactttatcttttttgcctcccaaggcttctgcgagagaaatcccctttttcttggcatataaatcccacacggctgattcaaggcccgcttttgccatgcggtttcctttaaaacgctcgagacagtcaggcacgtctgacgggtgggaaaattcgcggcctacgacatttggaataaaaaaatctttcagcatatgcgcgcatgtctgaatcgtttcttctgtataccacggggaagaaaacgccgatacctctccccagccggttctcccggtttcgtcgatcgcttccacgatcaaaaatttacggtcgtgcagagtttcaatacttgttttaaatggtttttttagcctcatactcacatgataaagggtgattttttcaatcttaatcatgacaattctcctttacgaagctcattaagccgatgcctcatcagtttattggacgcgttccgcggaagctcgtcaaccgcgaaaaaagcagccggtattttatattttgcaagacgttcacggcaaaaagcggtcagctcctctgaactgacagaagaagtcaaaacgagaaaggcatgcggcactttcccccacttcggatcttcggctcctgaaacaccggcttccgctacagccggatgggcaagcagcgccgcttcaacttcagccgggtagatgttctctccgcctgaaatgatgagatccgaccgtctgtccagcacatataaaaacccttcatcatccaaatagccaagatcgcccgttttgaaccagccattatgaaaagcggcctgattcgcttcgtcacgatgatagtaccctttcatcacattcggccctttcaccgtaatctcaccaggttcaaacggcgcacagcgatttccgtctttttcaattctgatttcacatgaaaacagcggtttacctgccgagccgagcttttccatgctgaattcaggagaaagcgtgacaatctgtgagcaggtttcggtcaagccataagactggaagaccggaaattgtttcctgcggcattcttcaagaagcggcagcggtgccggccccccgcctagcagaatgcaacgcagtgattcaggacattgttcagtctccgaaagcagacccgacagcatggtctgcacagccgatatgatcgtgacccggtgtgagctgatgctgtccagcacatcagtgacagaaaatttttggtgaagcacgacaggcatgccgtaaatgaccgatttaaacagtgcagacaggccgctgatatgaaaaagcggcagcgcaataagccagcggtcccgctccgtgacccccagattcagcgcagatgatacagcgctggaataatggtttccgaaagtctgctgcacccccttcggccttcccgttgttcctgacgtatacataagagtcgccgtatcatcgagcgttacatattcttccggctcaatgtctcccgcctcttcagcctgcagctcgtccacatctgcggtggcgactgcagattcataatcttcccggcgaaaaccgtcctccgtcaataaaagcttcgcctgtgaatcttcgagctgaaacagccgttcttgttttgagagcttcgtatttaacagcaccgcttccattcctaataagaagcaggcgtgaacggcataaaccatttcaggtctgttagaaagcaaaatcgcgacacggtctccttttttaagcgtgtagtattcggacagccgcgcggccatttgtttagaagcatggtacaattctttgaatgtcatctgtttgttttcaaatatgagagcgattctctcaggtgtcagctgagccctttgaatgagccaatttggctgttctgtcagcatgttatcatctccgaggtaaaagtactttttttgaaaagaaaacagcttggaccagagcggctcaagctgtttcgtagtgtcatctgatcacggaaaacgagggaactgaccgaaatcgggactgcgtttctctttaaaggaatcgcggccttctttcgcttcgtctgtcgtgtaataaagaagcgttgcatctcctgcaaattgctgaattccggcaagaccgtctgtatctgcgttaaatgccgctttaaggaaacgaagggctgtagggcttttctcaagcatttcctcacaccatttaattgtttcctcttcaagtttctctaatgggacaaccgtattgacaagccccatgtcgagcgcttcctgcgcgttgtattgacgacacaggtaccagatttcacgggctttcttatgtccgacgatacgcgccaggtagcctgagccgtaaccggcatcaaagctgcccactttcggcccagtctgaccgaaaatcgcgttatcagctgcaatcgttaaatcacagacgatatgaagcacatggcctccgccgatggcgtagcctgataccatcgctacaaccggttttggaataacacggattaaacgctgaagatcaagcacattcagacgcgggatctgatcgtctccgacatatccgccgtgaccgcggactttttggtccccgcctgaacagaatgccttatctcccgctcccgcaagaacgatgacaccaatctcagagtcatcacgtgcgtaagcaaatgcgtcaatcatttctgataccgtcttaggagtaaatgcgttatgtacctccgggcggttaattgttatttttgcaataccgttatacgtctcgtacaggatttcatcgtactgacgttcacttttccattctgcagccattgatatgacctcctctatttttgcatgagtccggccgaaaagtcattttctttatgctttacaagccgtttaaaaactcacttactatcttaccaaaaattcgcggctgttccacatgaaccgtgtgccccgcctgtttgacaacctctattttacttgatgggagcaggttatgcaccttttgattaatgacgcaaaatttttcatcccattcaccgcatatgagaagaaccggcgatttgatgcggtctaatgcactccaccaggaaggctgtgagcccgtccccattccgagcagactgcctgcaagaccggacggattatttttcagccggccggcacggatggacgcctttacattgtccggaagagaaagctgtgtggcaaacaacggaatgctttcccaataatcgacaaacgatgttatgccttcccgtaatataaagtcagcaagcttccggtctgactgaatccgctttttgcgttcctcgagcgtgctgaggccaggagttgaactttccagaacaagcgctgacacccgatgcggaaatgtctgtgcaaaggagtaagcaagtcttccccccatagaatacccaataagtttcactttgtgaagttttaattgatcaaaaacggcggcaaggtccgccacctgccggctcgcactataccttgccgcttgcacaggcgcgtctgtctctccgtggcccaggcagtcaatcatcaccattcgctcgccgggaaacatttcgcgtaaaaattcccatgattctttactgcccgtaaacccgtgcagacaaactatcgcttcagacgattcgtgaccgctgtcagccgcccgatagcacacaccgtccgccattttgacagttacagcttccattcttttttcacttcctggactgcggcctgcagcagatcgcgatggaattgaactcttgatgtccgatctgttttcagctcgataatatgaagtccgggcttgtccgcctgcggctgatacgcatccttaaatgcatcccaagtctcagggcaagtatacgtcccgccgtacagtgcggcggcatgacggaaatcaagtcccgtcggcgtaccgaacagttcttcaaaatgagttttatcagatgcctgcggcaaaaatgagaaaatcccgccgccatcattgtttattaaaataaccgtaagcggaattccaagttttttagccgctaacagcccgtttaaatcatggtaaaacgataaatctccaatcacaagcgtgacaggcgcctttgttccctcacacagtcccatagccgaggaaacaaccccgtcaattccgttagcgccgcggttggcatagacacggaaggaacggtcttgtttttcaaagaaagtatccacgtcacgaatcggcatgctgttgccgacaaaaatcgaactgccctcaggaacaaggtgctgaagctgacgatatacatttccttcaaatgataaatcatccatgtccgcggcctttaaatggctgcggaaccgctcattgacaaactgccatttctccagccatccggacggccgtttttcagtttcagctgaacggaccgcttccaacaatacagacggatggcaatgaatcatatgcgcgccggtctgagtgggatctctccacccgccgtcttcatcaacgataaactgctcaatggcagaatcgtctctgagccataaaaagagcggtttggaaaccggcatcggaccgaatcggatcacaacgtccggacgcagcgcctcttttatctcctcatcttttaagaatgagtcataggcatcaataatcagcgccttatcatgctttccgtttcggagatttgaaagcgggtcagccaaaatcgggaattgaagcatctcggcaagcgcgatgatctgctgtttttctgcttcaccgtgaatttcgccgcagacgatcatacccttttcggcactcgcaagacgctctgtaatatgacgcagagaggcttggtcagctgactgaatccctgttgtaacagagacatgccgcccagctctcattctttcaaaaggccgtgctgacaaatccggcatcaaaggctctctgagcggcacattgacatgcacaggccccatcgggcgtttgcccgcttcacttacggctcggccggccaatgttctgatataactcagcatctgaggattttcctcaggaagagctgagtctgtgaaaaacttaacaaagttaccgaacagaaaatgctggttaatcgcctgaggcgcccctacttcccttaattcatgcggccggtcagcagtcaggacaataagaggcactcttgaataatgagcttcaatcacggccggatagaagttagccgctgccgttcctgacgtacaaatcagcatgaccggacgctggcgggcttttgcaagaccgagtgcgaaaaaacccgcggatcgttcatcaatctgtatatggacatgaatatccgggtgggccgctgccaaaaccgccagcggagttgacctcgatccgggacaaacgactgcgtcggttatacccgaaagagcgaattcatcaataaagcttccgatataatgtgtaatcgggtttgtcaaagcctttcacctcctaaagcagagatcatcggctttagtttaatttgtgtttcttcatattctgattgcggatctgaatcttcaacaataccgcatcctgcgaataggcgcgcactttgatcttcaatcagccctgatcggatggccacgacaaattctccgttttccctgccgtccatccagccgatcggagccgcgtaccatccgcgtgtcatcggttcaatatcagcgataacttcaacagctttttgctggggcgctccgcccaatgccggtgtcggatgcagcttttcaatcaaatcaaacagcgaagcggacgttttaagatgaccgacgatcggcgtatataaatgctgaacactttttgttttatatagttgcggacccgccggctttttcacatcactgcagctcgacaaaaaagcatcgtgtatcatctgaaccacaaaatcatgctccgcgagattttttccgtcatgcagcaattcgttgccaagacagtcatcttcttgttgattttttccgcgcttaattgaacctgccaggcaggacgacatgacgtctttgccggattttttgatcagccgctctggtgaagcgccgacaaagcatttatttccctgctcaatcgcaaaaacatagcttgtcgtttgatccgtcaaaagctttctgacaacgctctccaccggaataggcccatcaaatgacaatacgacttcccttgccagcacgactttatcatattgatttgccttcatatcatttgttgctgtattaatggcttcaagccagttttccacatcaagttcttccgcttttgttaaagcaggatactcctcatacgccattgaagaaactgcaaaagcttcagaaaaagatttcagacgtttcagcacatcttctgcctgattaccgtctgccgcccattgattgacggttaaataatcaccatccgccgtctttgtcagcatgagtgagggaataaagaacagtccttcttcgaacccgttccattcgtctcctctttcttcagcgggattaaatgaaaaaccgccgaataagacaggaccgaccgcggtatgcgccgcctcttcttcatgaatatgaaaagccgtctttttaaagcgctcccattgttcaaaaacgtcgtgataacgctttttgtttttttcattcgattggaacagcgcttctgtgccaagaccgactattgttaattcactaccgggttctgaccaaaaaaatcgtttgcctttatatttttttgctccgtctttgaaaaatgatagagggtctaaagacgcaatacgtcttgaatagctcaataagacagcatggttgacttgtttggctttatgtaatgcatgatctgcttcctctcggaacgtatgctgcaccgttgtcaccatgagacattcctccataatccgttaaatgcttttaatacaatacacctgtgatgacattgtgtcaaacacacagatgtgagcacgacaaaatgcctgcatttcttattataaacctttttgcacaaatgaataaagaaacaaacttgaattttctttccccactctcggcaaacactgtatccttttactttactgtggaaaagtgaccatttttatccaccttttttctgtatcaaaaacgttcatactaactgtaagcatcacatagaaacgagggaacgatgtgcttacaaacgaacagatcacacacttgaaaaaagagctagaagaagccaaacatgatattttaagccgttttaaagaaaatgatcaatttcaattaacagatgaattcccgtatcagtcatccggcgaattgtcttcctatgacaatcaccccggcgatcaggcaaccgagttatacgagcgtgaaaaagacctggctctcctcgaccatgaacgggagcatcttcgcgatattgattactccttgaaacaaattgaaaacggtacgtacggcatatgtgaagtcagcggcaaggagatcccttatgacagactggaagctctgccgactgctacaaccttggcggaatattcctcgcaggatgccgtttctaaagacaggccgattgaggaggaaacaccgttcggacagtttgaatttgatgatgatgaatcaatacggccgccatacgacagtgaagactcttatcaggacgttgagaaatacggaaactcagaaacgcctcaggatttagagaatccgcctctcagctacaacgatatgacaatgaactctgaagaaaacatcggctatgttgaggattatgaaaacttcatcgcaacagatattaccggaaaaaacatttctgtatatccaagcagagaacacgaaaaatatgaacaggaactggacgaagaaggaattatgacgacgttcggcgatcttcatgctgactaaaaccccggcttgccggggttttaagtttgcagcattattgcaatgaaaactcatacactgaaaggggtatgcgactctttaaaaagtttgacctttacaaaatcgggaatgaacgtattgacattgaatatcggaaggaatagatgaaaaagaagtatatcggtgcgattattgtatttatcattacatatgccttgttttctttagctgggtttctctttcccatcgacagggaatggtacgacgcccttcacaaacctgactggacgccgagcggatcagttatcggcatcatatgggcggttttgtttgcgtttatctcgctgtcagcagccttgatatacgcaaaattttcatataaagaatccaaagctttctgggtgatgcttctcatcaattatatcgttaatcaaggattcagcttttttcaattcacacagaaaaatttgcttgctgcatctatcgattgcctgcttgtggccgttacaacacttagcttattgataattgcccgcaaatacagtaaagattcagcctggctgctggttccttatttattatggagtgtttttgccacatacctgtctttcaccatttacactatgaactcataataaaaaaccttgcatactatgcaaggttctttaatgacccgtacgggattcgaacccgtgttaccgccgtgaaagggcggtgtcttaaccgcttgaccaacgggccttatggcggagaaggagggatttgaaccctcgcgccgcttacacgacctacacccttagcaggggcgcctcttcagccacttgagtacttctccatatggctccacaggcaggattcgaacctgcgaccgatcggttaacagccgatagctctaccactgagctactgtggaaaaatcatcatggtgggcctgagtggactcgaaccaccgacctcacgcttatcaggcgtgcgctctaaccagctgagctacaggcccatgacaataaaaaaatggagcgggtgatgggaatcgaacccacgacatcagcttggaaggctgaggttttaccactaaactacacccgcattgttgtttggggcgattgatgggaatcgaacccacgagtgccagagccacaatctggtgcgttaaccacttcgccacaaccgccaaaacaatattaaattaagatggtggctcgggacggaatcgaaccgccgacacacggattttcagtccgttgctctaccaactgagctaccgagccttttttataaatggcggtccggacgggactcgaacccgcgacctcctgcgtgacaggcaggcattctaaccaactgaactaccggaccattttttggttgcgggggcaggatttgaacctgcgaccttcgggttatgagcccgacgagctaccgaactgctccaccccgcgatgataattaaattagatatggcggaggaagagggattcgaacccccgcgggctttgacacccctgtcggttttcaagaccgatcccttcagccagacttgggtattcctccgtatatgtggtggaccttgtaggactcgaacctacgaccggacggttatgagccgtctgctctaaccaactgagctaaaggtccaatggtagcggcggaggggatcgaacccccgacctcacgggtatgaaccgtacgctctagccagctgagctacaccgccaaaaaacaattaaaatcaactgcgcaaacaccaagattggtccggtaaatactgtccgcatcgtgtgttagcggaaggccgttgggaagccgtaaaagcggcaatcgcagcggaactcaaagcgctcggcggcaagtcttccgcaagcaagccggccaaggcatccggatcgacatacaccgttaagaaaggcgacactttgtccgaaattgcggtgaaaacaggcgtcagtatggcgaagttacaagcatacaatggcattaagaacgcgaataagattacggtcggccaagtattaaaactgacgggggcggccggttcttctaaaccgtcatccagcggtaagaaatacgtttaccttccggcgtctgccgactcatggcgcatctatcctacgaataaagcgccggtcaaagggaacgaaattaactatttgcgtccgaaaaaattcggcggccttaaatacgaaatccttgcgaatccgcaaacggacgtttacacgatcaagacggatcagttcggaaaggtaaatatctatgccggaaaaataacaggcgcaacagtaaaataaacgaaaagggagacgatgattatggaagaagtattgattttcgcgactatcctcgcgcccatcctaacggcgctcgttcagctcgttaagaaaacggttaagctgccgacgaatattgtgccggctctcagcttcgtcatcggtatcggattgggcgcgattgcctatccgtttacggatctcgacttggtgctgcgtttatgggccggtggctttgcgggtctggccgcgacgggtcttttcgaaatcggaacaaaacgagagggaactacgaaataaaataacggaactttttgcgagcgcttgcgtatgaatacgtaggtgtccgtttacataacgaacaggtattgcggaaaaagatggtcggatagtataatttaactacgaataggggaggcgtggaatttggttaaatttattcaatgcgttggatgtgctatacttgtagtaggtattatcgcttttttgtatcttggattcggcttgaaaacatatacaccgggtttatcggaaggctatacgtatgccgaaccgcacccgctacgatggatttacgctacggcctcctttttaggggcggctttcttcggcagcgtgctcatcgggctggctcgtattttacaccacaaggaatccgattctagttacattcgagaaatacaaaacgacctccgcctgatgaaagcgcgcgagggaatttcgaaataataaacagccctatccttaaccggatggggcgttttttttgtgcacatgtggataacaacgcttgtcattcgaggaaagtttgggtattatggtgttaacgagattcgtcgctaggaatacgcggcgttaacaatctaaacgaataataacaatcgtacaaatcgtacataaacgttgatatgatcgggttttcatttaacgtaaactgatcgtatgattcaccattgacaatccgaatgccatcgcttcctgcggctgcggttcttctttccgcacggccaaaaatgccggtacgccggaagagtgctaagggattcataggattagtgatgacgtctttcttttcgatggaacttacaccgtcgttaaggaaggcgtttttattatagcggaaaatcaaatatcgcggatagttgcggggcaggcaattctttttaataaagaaaacccgcttctgttgagcgggttttactttttcaaagatgttattcaattgtatgtttcattgcattgtacatattttccacgtgctcatcagcttgatcccgtgacatgcgcagccgttccactgaagaaccataaccgatttcttgtttgccctctttaagtcctttaaaaatcccatcagcgaattcatctagcggttcgccttgagtatgcagccctgctccgcctaaatccgtattcactgccggaggcgcaacttcaataacttctacagatgaatcagaaagctgatgtctcagactcatcgtaaatgaatgaagtgccgctttcgttgctgaatagatcggagcaatggcaagcggtgtaaaagctaatccggatgtgacgttaatgacagccgcattttcttttccggcaaaaaccggggcgaacaacatagacagatggaagggagcttcaatgttcgtggtgatttctttattgaaataatcccaattgtccttcgcatctgcttttaatacatgaaaccgctgctgaatccccgcgttgttcactagcacattcacttccggatggttctctgtcacccaatcaaacaatgatacacgttcagatggaatgctcaaatcactgacataggtaataagttccggacatttttcttttgctttttgaagagcatgttcacggcgtccggtaatgatgactttatttcccgctttgacaaagcgttctgcgaaagccaatcctatcccggcatttccgcctgtaatcagtattgtatttcctgttagtttcattttaactcctcttttccaattgttttctcatttctttgacaaacattcaccgctttcaagtcgaagttcaattaactactatccaatcaatatattgctaaaataaccgtttcaaggatcgaaacattacgcacaatcaacagcagcagtgattctgtaaaattgaattttgtgcatcatcggaaaaccgccaaaactattctttccttgtcacaggataatgatacgactttaagtatggtttaagtcaacaaaaaacttgtgttgccgttccggttaaaaaggataaagtctgggatttttcttgattaccatataacattggataagaggtagtgctgattattataagccatgtaaaaggatgggagacttatgcaggaagaaaacgccattgttatcagaccgctcagcctgaatgatgcagagcgggaactggttctgcagacggaaaaccgcatgttttttgaacagtttgccatgtcgagacaagaggacttttatacgctggaaggccggaaaaaacgaattgaacaatcactgaaagatgcggaaaatgatacagaatacagcttcggcatttttcttcaggatcagaccctgattggcacgatcagtctttttcaggtggttcggggctccctccaaagcgcttttatcggttacttttaagatggaaaacataatggaaaaggctatgcgacgaaagctgtcaagctgattgttgaatatgcattcaatgagctgaaactgcatcggatagaagccggtgtcatgccgcacaataaggcgtcaatccgggtgctcgaaaaagcgggctttcataaagaaggcattgcgagaaaaaatgtaaaaataaaaggaaaatgggaggatcatcaggtgctggcgatcattcatccggaggataaataatgatatcctctttttttatcccgcgtctcattcctcaggtattcttccaaaatcctcaaatcaattgtttgaatatactatttgcaaactcggataaaaataaagggtatataggactaaaatttctgaataatatcctctttaacaaccattccaaagtcatattttcgcgaaagtatgttgattttttcataggaataaactaaattgtaaaagtatagaatagttattttattttgtaagaaaaggatgataatatgataggtcaattgagcaataaaaaaatatttttaagttcttttttcatcattttgatctgttcattactcttccaatttagtatttcagataaagtgctgcaggcatattactcttctgtcggtgaaagtacctacgatatcggggagaaaagtgttcgtactattgtcatgtttttgcaagggtttatgatcttcactacttttgtggaaattctgataggcggatttctgttatttgttgccgcttttattcttggttcaaagaaaccgaaaaaaacatatttgcttctatatacactgacttctttaatctcggcatttaaaatgttaattctatcagttgttaactatgtaacggctgattcctcacttatatattctgccggcggctcaaaattgagtttacagctgctggacccgtttctgcttctatcaatcgcggctttatatactgccgcaggaaaacttaccgatctcagtaagaaaaaaagaatcattttgactggatgttttattttattaaaactcttcactattttctttaattattttatggcggataaaatttagctcgggagagagtaaatgaagctgaattttattatatattaaaaagcagagtagggagatgttatgatgaacttagtaaaatctaataaaaaatctttcattttgtttggcgcggcactagctgcagcaactttggtttatgcacttttattaacgggaactgaattaaatgtggcggcggctcatgcattctcagccaatgctgaattagcttcgactctcggcatctctacagcagcagctaaaaaagcaattgacattattgatgcggcatctacaattgcttctattatttctctcatcggtatcgttacaggcgctggtgctatttcttatgcaatcgttgccacagcaaaaacaatgattaaaaaatacggcaaaaaatacgcagctgcttggtaaaatcgatcaataaataattgctctttttgtacaagctgcaaaaagagcctctctcccaaatacatatgtaaggattgaaagtatgatagtcaaacaaattgcggctcttatcaaatataataccctgtcatcgtttcgcaaaagaaaggaagattggggaattcctcaactcagcagcaaactgctgtctgccattattatttctctgttatgtgtttatctcattttactgggatgcggtgtcgtattcgggacaaaactgattcagctccctctcagcgcatggggacaatttgttttaatcgccgtttcactggagcagcttttttgggctgccggcttctttaaagaacatcaaaatgcctttctgctggatacgcgcaaggtcattcatcaattaaaaaaggttcgttttttacagctgttttctgtttttaccggccaggcgatcaaaaaaaccattttcgtatggtatctttttgtttttccggtctttttgtttttatcaagcgcaggcatgactgggtctgcagcggtcatcgtatttttcctgggcttcgtttattttcttctcaatctatttttatctatgctgttttcttacgttgtttatcttcttacgaatatgtggagcaaactattttacctgaaaatcttgaagggcatattattcagcgtcagtctgctggttccgctggcagtcgggtatgctgtttatctgctcgtatttggggagtacacggtaaaggaaatctctggatttacggagtcaccggctttccggaacatcctcatgaatacgccgtatgtattgttagcattccgctcccattccgtgctcgtcttcgccgcggtatttgcggcagccgtccttttaacggcggggctgtttaagctgtggtcggccacattgaagaaaatggaccttatcccttatatgtttttgacaaacgctgattttgcgccaaaactgaaattatataggaataacaaaatatttcatgccgtttttcaaaaggatctgctgttcttatcgagaattgacgggtttttcatcagaaatttcggcagtatgctttatttgttcatgctgtttttaggtttttgtgttccgctgctctcccatcatttcaccgggtattcggcagcggccatcgtatccgcggcggttatcattgcgaacttttcgtatcagctcgtcggggatgcgctcaaaacagtattatcagttgacggagaaatcaaaaatcagcatctgtttcaccggaatattaaacatgcgtggcagcttgtgtttccgaaagtatgtatttataaccttgcggctcttatctattcgatcatcatcaccattttgattacggtgttttttccgtctcccgctgcactgacaatctacttgtttattgtatttttatgttctggttttttatacagtcttgttcagatttcaagcaccgctctgtatccaaagaaaaactgggagcacctgtacgaaattggagaagcgggaaaagcaaagacgtacaacaacttatacggttctttgattttcattgtgtcgcttcaaatcgctgcgatcacgtcgtattttatctataaaaagccggaaattgaaacgatgcttattcattctgcatcaggtatatttgtcctgttcacactattaaactatggagtcatgtttctgtttcttcgcagaatcaatatggcggaaaggtttgcgaacaatgattaaattagtaaatatacaaaaaaactatagtgaaaaacaggtgttaaaagatatttcttttgaagtgaagaaaggctcaatttacgctttgctggggaccaatggggtagggaaaacaacgactttaaaaattatctcgggcctgcttaaaccgacttcaggccgcgttgtgattgacggcaaagaaatggattcagaagagggggggcaaatatcggctgacatcggttttgtgcccgatcatacctttttgtatgattatttaacgggagtcgaatacttgcgttttacagctgagatgtttcaagtgccgtcccagcggacaaatgattatataaagaaaatgctggagatgctgaagctttctcaggacggtaatcagttgattaaaacctattcgcacggaatgaaacagaaattatcaatcgcggccgcgctcattcatcagccgaagattttaattcttgacgagccgctgacgggcattgatttaatcagcggcaaaacgatacggacgttgttaaaagagtacgtcaaacaggggaatacggttcttttatcgactcacctgctggagctggcgcattcgctgtgcgatacgatcggcattatacacgagggcgtttttgcggcggagtatcagtcagccgagcattcattagaagagattgaagaaatggctgagcgtatctatacatgatgaatcgcattttgccggcaatcaggacgtccgccattccgttaaccgcgtcattgctgtttttttcaggcggtgtaatcgctgcggtttttactgatcactttgtttcatcagcgtcttataatggctcgtcaggcgcggttgaactgttaaaaaataatgccatcgcttgtctgtttttagcggcaggtttttttactttcgggttaacctccatcttttatttattcaccaacggttttattttaagcggctctattatagaaaatctgcacagcgggatgcctttatatcagattattttactgctaattcctcatggtatatttgaagttcctgcgttattattaagtggcgccattggttttaaaggcgttgaattgatcatcagactgtgtttttctaaggaaaaaaagatattgagatcaatgttcaggcatatcggaatattggtgatgcttattatttgtctgctgatcgccgctgctattattgaagcttatatcacaccaatttttaagtaaaaggggcagaaatcatatgagaagcaaattatcattaatcggtgtgccgattgttatgattatcggttatttcatttctttatcttttgagtggctgttccctgtccttacttttggggcggcagggctgtatctctttatatttgccccggtgcaaaataaattcattcgttacatatttctgtttatttttgtgattaatctgttagccagcgcggctctttatttccgcatttaataaaaaatgacattcttattgaatgtcatttttttatctttgagcggctttgctgcgtgttaaaatctgtcgccgttgaaaatagagtttttcacgatcacgtagtcgacattgcggatggcttcgagtttattgccgccggcgtaggagatggaagattgcagatcctgctccatttcaatcagcgtgtcctgcagagaccctttatgctcgacatgcatttttttgccctctacatttttcttttcgcctttttgaaattcggaagcggagccgaaatattctttataaagctttccgtcgatttcgaccgtttgtcccggtgattcctcgtgaccggcgaataatgatccgatcatgaccatagacgcgccgaaacggatggacttcgcaatatccccgtgcgtgcggatgccgccgtcggcaatgatcggtttgcttgccgcttttgcgcaccagcgaagcgcggctaattgccatccgcctgttccgaagcctgttttaatctttgtgatgcagactttaccggggccgattcccacctttgtcgcgtcagcgccggcgcgttccagctcccttacggcttcaggcgtcccgacgttccctgcaatgacaaagctttccggaacatgttctttaataaattggatcatgctgatcacggcattggaatgaccgtgcgcgatatcgatggtgatataatccggcacaagctgctgtgctttcagctcccgaatgaattcataatcattttccttcacgccgacactgatggaagaaatcagtccgcgcgctttcatatcctgaacaaaagccaggcgtttttccggctcgaagcggtgcatgatataaaaatacccgttttccgcgagccaggcagcgatgttttcatctataaccgtctgcatgttggctggcacgaccggaagtttaaatgtgtgtccgcccaacgtaactgatgtatcacattctgaacggctgttcacaatgcattttgcgggaatcagctgaatatcttcgtaatcgaatacattttccatacataacacccctaaaagcgaataataaaattatatcaaaaataaaacgttcgtctttttataatgtactttgttttgtcaggaatgtcaaatgatttcatgctgccttatatgcggtcagcttgtcatccaattgcagtttggttatcatagtagtattgattgttgtaaaacacttgtcacgatagatagttttgcagaggaagggaggggccggtgtggaagaaaaacagcccgggcacagtccgaaagcccagaaaattcaggaccggattattttaggcacgatttgggtcgtctcagcgcttgtcattgcgcttgttgtcggaactgtcatgaattatatttggatgtttaaataaaaaagagtctgtgccgatatgacacagactcttttttatattatttttcaaacatgcttgtagaatgcagaggctggacgcgcgctttcgggtccatgtaagccttcgcgttgttcacggctgtcggagcttcgccgaaaccgctggcaatcagcttgactttgccttcatatgtgcagatatctccggcggcaaagaagccttcaatattcgtttccatcgtgcttttgacgacgatggagtttttctcgatttcaaggccccagtttttaatcgggccgagagaagaaacaaagccgtagtttacgatcaggtcatcaatttcaatgatttctttgcggtcgcctttcacttcttcaagaacgatctgttcgatccggtcttcaccgacaagttcagtcggaacaaacggtgtcagcacgttgactttagaattgtgcaggttttctacactgtgttcatgcgcgcggaatttatcgcggcggtggatgatgctgacttctttcgcgatcggctcaagcatgagcgcccagtcaaccgcggaatcgccgccgcccaaaacggcaacgcgtctgcctgcgaattgattgaggtcgtcaatgaagtagtgaaggtttttgccttcatattgctccgctgattcaagctcaagctttctcggcttaaacgcaccgtttcctgcggtgataataaccgtttttgaatagtgcgtttctgaatttgtgacaagcttaaacacaccgtccgcctgtttttcaacagattcgacggcctgctctaagcagatggtctgctcgaactttgccatttgctcttttaagttgtccacaagttcttgggcgcggattttcgggaatccggctacatcataaatatatttttcagggtacagcgcgctgagctggccgccaagctgaggcaggctctcgatgattttaacgctcgcctgtctcattcccccgtaaaaagcggtaaacaggccgaccgggccgccgccgatgaccgtaatatcataaacctttgaatcctcttgcataccaaattgcctcctaattgaaaattgttattaattataacatacaaattgaaagaatgacgagtgccgaaaaccgccaggccgcttcattcttgaaaaaaaacgcggccgccgctaagatggggacaaattccattctgttttttcctgaatgttttccgactcttccggatagtatggtgatatgcagacatgtgcggttttctaaaaaatttataattcatttcataaaatcccgccaataagctgaagctaatacaaatgttgatttgattatgcgtctaacagcaaaaaaaagaaggtggatgtgatggcattgaataaacccaaaatcgtggttttaggtgcaggttatggtggattaatgacagtaacaaggcttccgaaacatatcgggacaaatgacgccgacattactttggtcaataaacacaattatcattatgaaacgacatggatgcatgaagcgagcgcaggaacgctgcaccatgaccgctgcagatatcaaataaaagatgtaatcaatgaatcacgggtcaaatttgtgcaggataccgtaaaagcgatagatgttcaaaataaaaaggtgacgctttcacaaggggacatcccttatgattatctcgtcatcgggcttggcgcagtccctgaaacattcgggattaaaggtttaaaagaattcgcctttccgatcgcaaatattaatacgtcgcgccagctgaaagaccatattgagctccaatttgcgacatacaatacggaggccgaaaaacgccctgaccgtttaaccatcgtcgtcggcggagcgggatttacgggaattgaatttctcggagaactcgcgaaccgcaagccggagttatgcagaaattatgatatagatgaaagtctcgtccggatcgtctgcgtcgaggccgcaccgacggttttgccgggatttgatccggagcttgtggattatgccgttcaataccttgagagcaagggcgttgagtttaaaatcggcaccgcggttcaagaatgccgcgctgacggtgtcacagtcggcaagaaagatgaagagccggaagaaatcaaatcgcagaccgtagtctgggccgcaggcgtgcgcggacatccgatcgtggaggaagcgggttttgaaaatatgcgcggccgtgttaaggtcaatcccgatcttcgggcgcccggccacgataacgtttttattctcggcgacagctcgctctttattaatgaagagacggaacggccgtacccgccgactgctcagatcgcgatgcagcaaggagaaacagtcgccaaaaacctgggccgtttgattaaaggaggccagcttgaagagttcaagccggacattaaagggaccgtcgcctctctcggtgagcataacgcggtcggtgtcgtatacggcaggaagctcaaaggcacgccggcgtcctttatgaaaaaggtaattgacaaccgctcgttatttatgatcggcggcctcggtctgacattgaaaaaagggaagtttaaattcttctgaaaacccgcggccgcgggttttttcttctctcaaaaaagagcgctgcgaaaagcatgtaagagaaaaaatgaatgtttccgcttacatgagttgatttgttacatattctgacttggtgcttgacaagtaaatatgatatattatcagaaaattaagaaaaagggtgatccgcatgaaaacgacagcaaaaagcactgcggcatgtccgttctgctcaggtaaagggtattttcaattgcttcttggcggctccgaaacatgtccctcctgccggggaagcggcaaagagagacgctgatttttccagacgttgacttttttaccgcccccgaggtacactgaaagtgctgtagggggtggatgtttgtgattagtttgccggtcgtcctgatctcaatcgtactattttttgtactgtttttcggcattggctttctgttgaacatgctgctgagaatgtcgtggattatggctgttatctatccgattgtatgccttttcattatcagcaataaaaagatgatcagttacgtgcaggcaccgggggaatcatttcaaagcctgtttcagcgcatcatgtcattagcagccgcagatgtcgtgattttggcaggcggactggcgggagccgtcatgtcaggcattgccataaaggcgctcagaaaaagaggatatcaaatgttttaagccgctttcttattcgagaaagctttttttgtgtttgtatagcgcctcaccgagttgggaacactgactcggaggagaggtgatttcagagtgacgataatcagacgcgtattcatgatcgtgctctttttaggcgcgtgccatgcgacatacttttccataacgggtgttgaagcaaaggatctgtcaaattggatgacggaacatcgcggcgccgctttgaaaaacatcggtattccgtttcagtcattacagaatcagccggaaaagaaggcatcaggcaaggtaaaaccactggaagaagcttttgactggaaccgttatccgtctcaaaaggtgacggccacaggttataccgccggagcggaatctacgggaaaatctccggggcatccgcaatacggaattacatattcaggcgtgaaggtcaaacgtgatttatattcaactgtggcggccgatccgtctgttttcccgatcgggacgattctgtttataccgaattacggatacggggttgtcgccgataccggttcgaaaattaaaggcagccgccttgatctttactttgacaccgtaaaggacgtctataacaactggggtaaaaaaacacttgaagtctacatcattaaaaaagggaacggcacagtgaccgaggacgaacttgtaaagctgaacgaaacaaagtcgctgcaagtgttcagaaaccaatacaaaacggtaaaagaataaaaacgcttcagcatccgctgaagcgttttttacataaagaaataatctaaaatcagagtcagcacaataccggtgacgccgccgaagaacacttcgatcggctgatggccgagcaattctttcagttttttctgtttttctttctcttccgctttcggaaagtccttcgcttcgctgacaaaccggttaaaatcgataaccagcttattaatgaccgtcgcctgttcacccgcatgccgccttacaccggtagcgtcaaacatcgtaataacggcgaaaatcgcggcgactgcaaacaggggggagtccagtccctgttccaaagcgactccggttgacagcgcggtgacggcggcggaatgggaactcggcatgccgccggtgctcgtcacaagagtccagtcaagttttttggatacgataaattgaataggcacttttacaacttgggcaaaaataatggcggcaaaactcgccagtaaaggaaaattcataagtacacccatatgcgacatcctttctgtatctgcggagtccgatcgtatcgaaaaactgcagaaaacgcccttagtttggtaaaataaaatcaatggaaaaatgttttttcattataccactttacataacaaatacccacataaggagtgtgtactcatgttttatgcatctgatcaattgcggcatcccgaaacacttgtcatcggtctttttcaaaaaagcacgctgaacggatttacgaaggaattggatgataaactggacggacatctgacgcagctgttaaaggacggtgatgtgtctgccaaacgcaatcgtgtatcaaaagtataccctccggccgcaaccggtatgaaacgtatttattttatcggcttgggaagggaagcggattattcgtttgaagatacgaaggaatgcttcgcacgcgtgtttcagcagattcatcaagataaaaaacaggaagtatccgttttgcttgatacattcgtctccggcgaagtgcctgccgccgatgccgctcatgcgctttcagaaagctgtctgcttgcggtttatgaagtgcaggattataaacataaatcgaatgagccggatcaggaactgacttcagtctgcgccgtgacggaagaagacctgagggaagtgcaggccggcctgaatgtcggcgcggcatacggtcaagggacgaattcggcccgcacgctcgtgaatatgccgggaaatatgctgacggccactgatctggcctcatatgccgctgaacttgcggcgaaatatgatttcgagtgtgaaattttggaaaaagatgaaatggaagagctcggcatgggcgggctgcttgccgttaacaagggctcatctgaaccgccgaaaatgatcgttctgaagtatcagggcaaagatcagtgggaagatgttatcggcctggtcggtaaaggaattacctttgatacgggcggatattcaattaagccgaaaaccggaattgtcggcatgaaaagcgatatgggcggagccgcttccgtactgggggcaatggaaattatcggcgaactgcggcctgaacaaaacgtgctcgccgtcattccgtctacggacaacatgatctcgtccgatgccatgaagccggatgacgtcatcgtctcgctcagcggaaaaaccattgaaatcctgaacaccgatgcggaagggcgcctcgtgcttgccgacggcatcacatatgccaagcagcacggagcttctgtcctcgtagacgtcgccacattaacgggcggtgtcattgtcgccttaggaaacgaaatgacgggcgccatgaccaataacgccgcgttttatgaacaggtggcagaatcggcgaaagaatccggggaaccgatctggcagcttccgattacagaaaaggataaaaaacgggtgagaaacagtcagatggctgatttgaacaattctcccggaagagaaggccatgcgattatggcggggacattccttggtgaatttgcggaaaacaccccttgggttcatctcgatatcgcgggaaccgcgacagccaataaagcgacatgcttcggccctgccggcgcaacaggcgtcatggcaaggacgttggctgttttgactgaacggtttactccagaaaaataacagcagcccgctgccttgatgcagcgggtttttgatttccaaaatctttagttgactaaagcgcggaatatatgttaactttaattatctactacattagcaaactaaagggtttttggagggacatatcacatgaatgctgttgttgtcgcagtactgcttatgctcgtcttaagcctgctgcgtgtcaatataattatagctttaatgatcggagcgcttgccggcggactgaccggcggcttaggcctcggtgagacggtgaaggcttttacggacggtctcggcggaaatgccaccgtcgcggtcagctacgcgctgctcggagcatttgccgcggcactgacaaagacggggcttcccgatgcgatggtcgaagcgtctgtcaaattaatcggaaaaaaggaagattcgcggaaaaaagcactgtctaaagtgttaatcgtactcattattttaatcatatcctgtttctcgcaaaacgtggtgcccgttcacattgcgtttattccggtactgattccgccgcttttaaaaatatttaatgaactggaaatggaccgcaggctgattgcgtgtgtgatgacattcgggctgactgcgccgtatatcgttctgcctgtcgggttcggacagattttccaggggatgctgagagataatatggcatcagccggtttaaaggtgccgctcagtgatatcccgtacgctttaatcattccgacggcggggatggcagtcggtttaattttagccgtcatcgtctaccggaaaccgaagaaatatgagacgaaggaaattgcgggattatcgtcttctccttatacgagaaaaagcatcgccatcgccctgatctccattggcgtatcgcttgccgttcagctctatctgtctcaggtgctcggagtggaaggtatgatcatgggcgcgcttgccggcttgtttacgctgtttatcagcggagtcatgaagcgtaatgaagccgataagctgattacggacggcatgattctgatggcctttatcgggtttgtcatgctcgttgcagccggtttttcaaatgtattgaacaaaacgggtgatgtggcttccttggtcaaagcatcaacagggttgatcggcaacagccaatcattgggcgcgctcctgatgctcgtcgtcggtttgctaatcacgatgggaatcggatcgtcatttgcaaccgtacccgtcattacgacgatatttgttccgctgtgcgctcaactcggattcagcccgatggcgacgatcgccgtaatcggagcggccgccgcggtcggtgatgcgggttctcctgcaagtgacagtacgctcggaccgacgtcaggcctcagtgccgacggccagcaccatcacatatgggatacgtgcgtaccgacatttattttctataacattccgcttgtgatattcggctggattgccgcacttgtcctgtaaaaaaaggctcccggaaaggggagccttttttgtatggcctaaaaatacttacgcaggatttcgattgaaccccgtcgctttatgaacggatctgtaaacggcaggcgcgatagatgccaataacagtgctaaaatgatatcttttatgaaaaaccaaatcatataaaaccaggccattccgtagctgatcggagcatgaagccataatttcagcgcaatatacgtataggtcgtgccaatgatataaatgacggcggtgccgatcaaagaggcccatgcataatgcaggcggccgggttcttttgttttttccagcagccatccggctgcaaatgccgccgggatgtaggcgagaataaatccgccgctttttccgataaacggcgcaaagcctgctgagaattgagcgaaaataggagcccctgcaagtccggccaatgcgtataccgtcatcgcaatggccgcccgtcttgcgccgagaagcatcgcagctaacagacaaaagaaaggctgcagtgataacggaatccccgcaacttgcaaaaagggagccattgatgtaatgttggcgccgacggccatcagtgcggcaaacatgccgataagcgccatatcgcccgcgcgaagattgcgttgtttcatttgattttcccccttacacttgtaccagattagcgtaatcgaaggaaaattaattgtcaacacgaattttatataggtttactaaatggagggagccatatgtttttcggaaaaacgaaacaaacaaggcagtcggatcggattccgccaaaccaaaatgtcacaacgaagtttcccgtgcttcacgccggaaatgttccttattatgaagatatgtcaaaatggaatctgcaagtgtacgggcttgtcgaccatccgatgctgttaagctttgaagatatcaaagcctttccgaaagccgaattgaaaaatgatattcactgcgttacgggctggtcccggcttgataacgtctggcagggaatacgcgcgaaagatatcgccgagaaagcgggcgtgcatgaagaagcgggtttcgtcattttgcacgctgaagagggctggacggccaatctgccgctttctgattttatgcgggagacttccctgctggcatatgcgtttaatggagagccgttaacgccggagcacggctatccgctcagaggcgtttttcctcatctttatttttggaaaagcgctaaatggctgcgcggcattcagttcacaaaggaaaaccaccccggcttttgggagaaaaacggctatcatatgaggggagacccatggaagaatcagcgctttacatgggattaagcacatatcaacatatagttcttaggtaccttattagaataaggtgctttttttatatcaaaaatccattgactttgtttggcaaaaaacctattatttgaggtgtcttttgatattgaaaatcattatcaatgagaatagataaagcaattgtcacagaggggatgaactcataatggacggaaatcaaacaaagcggggttccgcgccggccggtcgatatgcgatgccgggcacagaagtaagagaagtgcgttcaaaaggaggccgtacgtatcgtctctttgtctcttttcctcaggaagaaccgcctgcatccggttttcccgtcatatacctgctcgatgcgaattccgtgttcggaacaatggctgaagctttacgggtgcaaagccgccggcctgaaaaaacaggcgttgtcccggcggtgattgtgggaatcggctatccgactgatcagccgttttccgccgaacgccacagtgattttacgatgccgctctctgaatcagaactgccggtgcatccgcgcggggcggcgtggcccgagcagggaggagcggaagcgtttctggcatttatagaaaaagaagtaaagcccgcggtggagcgggattattcgatcgacagagacaggcagacgattttcggccattcgctgggcggtctttttgtgctgcaagtgcttttgacgaggccggacctgttccggacctatgttgccgggagtccgtcaatccactggaacaagcgctttattcaggaagaagcggagcgtttgtcagaacggatctctgaggaacatcttcaagtcagcgtactgctggcagcgggagaaattgaaaagacacataaaagcaggattccgcagcacgcagaggagctgtactctgtattatctgcgtttgaaggtgacggagtccgcgctgaatactgcgagtttgaaggagaaggccatatctctgttctgccggttttaatcagcagagccctgcgtttctgcctgaatccgggagggccgcataccccgtattccccttcttgagaaaacaggcccttcgaactaaatgaggctgattctaattttctaattgactgagtgttttgatttggatatgattgtcttgaaccacaattgataatgataatcattatcaatagagaaagggaatgataatatgaccgcattgggaatgaaagggaaaacggcagttgtcaccggcgccgctcaaggcatcggagaagcaacagcgcttgcccttgctgaacaaggagtaaatgtggcagctatagatacgaatgaaggcctgcttctcggtcttactgacaggctccggcaaaaaggcgtccaagcgcaggcttttgccgcagatgtatcagacagtgcggctgtcaatgatatcatcgccgccgttgaacgcgacatggggcctattgaaatattggcgaacgttgcgggcgtactgcggccgggtccggtgcattccctcagtgatgaagattgggctcaaacattttcagttaatacgaccggcgtgtttcatgtatcacgcgccgtcagccggtacatgatggagcggagaaagggggccatcgttacggtcggttcaaacgcggccggcgttccgcgcgcttccatggcggcttatgcggcgtcaaaagcggctgccgtcatgtttacgaaatgccttggactggagcttgcggcctatcatatccgctgcaacatcgtatctcccggttcaacggaaaccgagatgcagcgggcgatgtggcaggatgaaaacggagcaagggacgtcatcagaggttcgcttgatacatataaaacgggaattccgctacaaaagctggcaaagccttctgatattgcaaatgctgttttgtttctggcctctgaacaggcaaaccatatcacgatgcatgacttatgcgttgatggcggtgctactttaggcgtttgatttacgagaaggagggacaaacatgacaaatcaatatttattgacggaagtgtctgcaaaagaggtgcttgacgcttacaagcccggtgcgttctttttagcttccccgaaaagtacgatgcttgcggaaggaattttttcaaaagtgcctgatgcgggtgaggagaaacagctggaatcgctgcctgaacgtgtgcggcagacgcttcttgaggcaaagcaggccggcatcaaacatccgattgcggctggcgccattccgtttgacggaagaaaagcttcccggctttttgtaccgaaggatgtccatacggcaggcccgctttcgttttcagaagcttccgcagaaaaaccgcaatccaatacatatgacatccggcctgttccggagcctgagggcttcatgagcggtgtggaaaaaggcgttttaaacattacggacggaccgctcagcaagattgttctgtcaaggacgcttcatctgaccgctgaaaaggatatcgacatcccccaagccgtcaagcatttggcgcagcacaacccgcgcggctatacattcgctgcggatgtgacgggaacgtcagaaacaagaaaaacgcttttcggcgcaagtcctgaactgctgctgtcgaaaaacgggacatcaattttgtccaatccgctggctggttccagaccgcgcagcgcagatcccgccgaggaccagagaagagcggaggaactcctgcaatcagccaaagacctgcatgaacatgccgtagtcgttgccgccgttgccgctgctcttaaaccgttctgccgcgtgcttgatgtgccggaaaaaccgtcactcattaaaaccgaggcgatgtggcacctgtcaaccgaagtcaagggagaacttgctgatccgtcaacgacctcgcttgagctggccatcgctcttcatccgactcccgctgtatgcggaacgccgacggatgcggcgagagaagcgattcaggatattgagccgtttgaccgtaatttctacacgggaatggcaggctggtgtgatgctgaaggtgatggagagtggattattgcactccgctgcgccgaggcagaaacaaggtctctcaggctctttgcgggtgccgggattgtcgccggatcaaagccggaggatgaattggacgagacttcggcaaaattccgcacaatgctccgggcgatggggctatatcaagatgagatgtgaaaaaggaggatacggatcgtgctgacaggatttacgccatggccggaagaatgggctgacaaataccgcaaagacggctgctggaagggtgaaactttcggaggaattctgaaggagcgcgcggctttatatggaaatcaaactgccgtgacgtataaagatgtacattggacctacaaagaattagatgaaagggccgatcgtttagcggcgggactgcacaagctcgggattcaaaaggaagaccgtgttgtcgttcagctgccgaatatcgctgagttttttgaagtgatattcgccctgttccggctcggagcgctccccgttttcgcgttgccttctcatagaagcagtgagattacttatttttgcgagtttgcagaggcgaaagcatacatcattcctgatacgcattcaggctttgattacagagagcttgccagacaggtgaaagataaacttccggctttggcgcatgtcattgtagccggtgaggctgaagagtttctggaactgagcagcctgcacagagagcctgttcagctggaagacgtaagctcggcggaagtcgcttttttacagctttcaggaggcagtacggggctgtccaagctgattccgaggacacatgatgattacatatacagcttgcgcctcagcgcggaaatatgcggcttggatcatcacagcgtttatttagctgctttgccgacagcgcataattatccgctcagttcacccggtgtgctgggaactttatatgccgggggccgggttgttctgtcaccgacgccgagtccggatgactgcttcccgttaattgaaaaagaacgtgtcacgattacagcgctcgtcccgccgctcgccatggtatggatggaagcatccggatcgcgaagtgatgatttatcaagccttcaagtgctgcaggtgggaggcgccaaattcagcgctgaagcggcccgccgcgtgaagagcgctttcggatgcacccttcagcaggttttcggaatggcggaaggattagtgaattatacgagactggatgatcctgaggagattattatcaatacgcaaggcagaccgatgtcaccatttgatgaagtgagggttttaaacgatgacgggcgggatgcggctcccggcgaaaccggacatttgtttacacgcggtccttacacgattcgcggatattataaagcgcctgagcataatgcgagatctttcacagccgacggcttttatcaaaccggcgatatcgtcaaactgacggaagacgggtatattgtcgtcgaaggacgggcgaaagatcaaatcaatcggggaggcgaaaagattgccgctgaagaggtggaaaatcaccttctcgcccaccctgccgttcatgatgcggccatggtttcaatgccggatgattttctcggagagcggtcctgtgtgttcgtcattccgaaaggagaagcgccgaaaccgggagagctgaaagcatttttgcgtgagcgcggactggcggcctataaaattcccgaccggattgaatttaccgcttctttcccgaaaaccggcgtcggcaaggtcagcaaaaaggatcttcgcgaaacgatcgccaaaaaattgaagcctgctgaaatcaaacaatcataaaaaaggaagtgtttacattggctataccggctattcccgcatatgcgctgccgacagcgtcagatatgcctgaaaataaagtatcgtggactctgaacccgaaccgtgcggtgcttttaatccatgacatgcagaattatttcgtcgatgcttttacaaaaggggcggctccgatcacagaggcggctcagaatatcaaaaaaataaaagagcaatgcaaagcgctcggcattccggtggtgtacaccgcgcagcctggcagccaagacccggcggaccgtgcgctgctgacggatttttgggggccgggactcaaaagcgggccttatgaggaaaagatcattccggaacttgcccctgatgatcaggacattgtcctcacaaagtggagatacagcgcgtttaaacggacgaatctccttgacatcatgcgtgaaagcggcagggaccagctcatgattacgggaatttatgcacacatcggctgcctcgtcacagcctgtgaagcatttatggatgatatccaaagcttctttatcggagacgccgttgctgatttttcttcagaaaaacataagatggccatcgaatatgcgtcccagcgctgtgcttacacggctttgacaaacgaagtgctggagctcttggcaggctctgctgacggagaagagaagacttcagccgcattgacaaaagaacggatgagggagcaaattgcggcgattcttcaagaatcaccgtctgatattctggatcaggaagacctgctggatagaggccttgactctgttagaatcatgagccttgtcgaacaatggcgccgtgacggagctgaagtgacgtttgtggaactggcggagaatccgacgctggaagagtggtggagactgctttcttcccgatctcaaaaagtcttgccgaacgcagattatttataagggagagaatagaatgcatgaaacacaacagctgcctctgacaggcgcacaggccggtatctggtttgcgcagcagcttgatcctgataatccgatttacaatacaggcgagtacgttgagattaacggcacaattgatgtgaacatatttaaaatggctcttgagcgcgtgctgacggaagccgcgtcattacatgcccgcttcaccgagggaactgacgggccgagacagatcatcaatccttcttgtgaggcggcaatcgatgtcatggatgtgagcgcagaacctgatccgatgcaggccgctttcagaatcatgcagtcggatttggctgagcccgttgatatggcggctgggcctttgttccgcgacattttattccaagccgggccggaacgctttttctggtatcagcgcattcaccacattgcgatagacggctacggtttttcactgctggcacggcgtacggcgcaattatacaccgcgatacgggagggacgtccggataacgggcgctccttcggttctttggaggagctggtaaaagaagatcaagagtaccgagcgtctgatcaatttctgaaagatcgggaattttggatggagaaatttgcggatgaacctgatgtcgtcagcttggcagaaagagcgccgagaacgtcaaaaagttttcggaggagcacggcttatctttctgaaacggttttacagcatgtaaaagcgattccaaactggcacgaggccgtaacggccgcagtggcgatatacgtccaccggatgacaaacgccggggatatcgtgctcggtttaccgatgatgggacggatcggttcgatttcactgaatattccgagtatggcgatgaatcttctgcctttacggctttctctccgcccggatatgaatgttcacgagaccgtcagccaagtggcaaaagaaatccgaagcatccggcgccatcagaaataccgccatgaagacctgcgccgcgaccttaaattgttaggagaaaaccgcaggctgttcggcccgcaagtcaatgtgatgccgtttgattatgcgcttgatttcgccggagtgccgggcaccgttcataacttatcagcagggcccgttgatgatttgtcaatcaacgtttacgacagagcggacggccgcggattgcgtgtggactttgatgcgaatccggaagtctacagcgccgaagatatcgaaaaccatcaaaaacgcttcttgctgctgctggagtcggctctgaaagaccagacgcaaaaaatcggcagactcaatcttctgcttgaaaacgaacgtctccgcgtgctggaaagctggaatgacacgcgcaaggccgaaaagcagaaaagtctcccggagctgtttcatgatcaggttgtaaaaacacctcaccgcccggcaatcatcacggaaaacggagagctcagctatgccgaattgaataggcgagcgaaccagcttgcccgcatgttaaagaaaaaagggctcgggccggaacaatttgccgccttattgcttcctcggtcacaggaactggttgtgagcatgctggccgttttgaaaacaggagctgcgtacctgccgcttgatcctgattttccttctgagcggatcacatacatgctcaaagatgcacagcccgcctgtctgattacaacgatggaattatcgggccgtatgccggaggaaagcgatgcaaaaacgattattctcgatcacccggatacggtaaaaaccgttgctggtcaaaatgctgactgtcctgctcacacggaatattcacctcagcaccctgcttatatcatttatacctcgggctcaacgggcagaccgaaaggcgttgtcgtcacattaaaaagcgtaagcaatttcctcctatccatgcgggaaatgttcccgctcggcgcacaagaccgcctgcttgccgttacgactgctgcgtttgatatttccggacttgagctcttccttccgcttatcagcggggcgggctgcgtcattgcccgtaaagagacgattcaggaaccgcaggcgcttgcgcacatgattcactcatacggtatttcaatcatgcaggcaacgccgacactgtggcattcattggtcacaaatgaaccggattcactccgggcgctgcaggtgcttgtcggaggtgaagcgcttccgaatgcgcttatgcatgctctgcttgaattggactgtacggtgacgaatctgtacgggccgactgaaacaacaatctggtcggccgcacagccgcttgcaaaaggccataaaggggcgcctccgattggaaagccgatttggaacacgcgggtatacgtgctggacgccgcattgcagcccgtcccggcgggggttgcgggcgagctttatatcgcgggcgaaggacttgccagaggatattataaccggcctgatttaacagccgagaggttcattgccgatccgtacgggtcagcaggtgcgagaatgtacaggacgggagatcttgtgcgctggcgtgaggacggctctcttgattatatcagcagagccgatcatcaaattaaaattcgcggcttccggatagaattaggagagattgagacggtgctgtcaaactatccgggtattttgcaggccgctgtcattgtccgtgaagatcagccgggagacaagcggctggcggcttatgctgtcgcggatcatccccttgatatcagcgggcttcgtgcatttatgggcgaaagcctgccggattatatggtgccgggcgcatttgtacagctggaagaattgccgctgacaccgaataagaagctcgatcgcagcgctctgcctgcgccggatttttccgccgtcctgtctgacagagggccgcggacgccgcaggaagaaatattatgcgatctgtttgccgaggttctcgggctcgctcgggtcggaattgatgacggattctttgaactgggcggacattcactcttagccggacgcctgatgagccggattcgtgagacgatgggcgcagagctcggcattggccgcctgtttgatacaccgaccgttgccgggctcgccgcacagcttgacaccgcaaagagtgcgcgccctaagctcaagccgtttgaccggccggagcacatcccgctgtcatttgcgcagctgcgtttgtggttcctttactgccttgaaggtccgagcccgacttacaacattccggtgattgtccgcatgtcaggaaaccttaaccagtcagcgctgaaacacgccttttacgacgttgtcagccgtcatgaaagcctgcgcactgtttttccggaaaataagggatcatctcatcagctcattttacctgctgaagaagcccggcctgcgtttacagtgacacatgcagacaaaagtgagcttcaagacatgattgccgctgcagcacgctaccggtttgatttggcaaaagagccgtccgtccgggctgagctgtttgatcttggtgacggtgagtatacgctgatggttctcctgcatcacatcgcaggtgacggctggtccttgaatccgctcatgcgtgacttatccgcagcctataccgcccgtcaaacaggcgaaaaagcagaatggacaccgctgccgattcaatacgcggattatgcgctctggcagcagcagctattaggcagtgtgtctgattctgagagcttaatagcgcggcagcttgatttttggaagaaaacgcttgaacatgtgccagatcagctggagctgccgtctgattttccgcgtcccgccgaatcaagctacagaggcggcgtcattccggtcaaaatcggccgggagcttcacagccgtctcctctcgctagccagaaatcagcgcgtcagtctgtttatggtgcttcaatcagggctttcggcgctgctgacccggctcggggcaggaaccgatattccgatcggcagtccgattgccggccgcagtgatgacgcattgggcgatcttgtgggcatgttcatcaatacactggtactgagaaccgatacctcaggcgatccaagcttttgtgagctccttgaaagggtgcgggagatgaatctcgcggcatatgaaaatcaggacgtgccgtttgaacgtctcgtggaagaattgaatccgcttcgttcccgctcaagacatccgctgttccaagtgatgctcgcattccaaaatacgcctgaccctgtgctcagccttccagaaatggaaacaagcctgcaaatcagcagcgtcggagcgtccaagtttgatttgacacttgaattggctgaacagcgccatgacgacggcacgcctgccggtattgaaggcctgctggaattcagcacggacttatttaaaaaagaaacggctgaggcacttgcgggacgtctgcttcttctgctcgaagatgctgcggcggatccggataagccgatcggaagcttaaccattctttccgatgaagagcgcagaaagctgttgtcggttaaacggactgcacagcacattcagcctcagcagacactgcctgagctgtttgaaatacaggccgctgaaaaacctgatgaaacggcagcagtatttgaagagcgccgactcacttacaaagagctgaatcaaagggctaatcagcttgcgcatatgatgattgcccgcggcgtcggcccggagcagtttgtcgcgctggctctgcctcgctctttagatatgattgtcgggctgttagcagtcctgaagacgggagccgcgtatttgccgcttgatcctgattatccggcggaccgcatcgcttttatgttacatgatgccaagcccgtatatatgctcaccaaccgtgaaggcgcaagtaagctctctatcggaagcggtatgaccgccttcatcttagatgacccgcagaataaaaaaatacttgagcaatatgccgtcacgaaccctgcggatgccgaccgtatttgtcctctgtcgccgcttcacccggcctacgtcatttacacgtcgggatcgaccggtgtgccgaaaggtgttatcattccgcacagcaatgtcatccggctgtttgagtccacgcagcactggtatcacttcgattctgatgatgtatggacgatgtttcactcttacgcgttcgatttttctgtctgggaaatttgggggccgttgcttcacggaggacgtctcgtcgtcgtgccgcatgacaccagcaggtcgccggaagcgtttctgaatctcctcgtgaaagagcgagtgaccgtgcttaaccaaacgccgtcagcattttaccagctgatgcatgcggaaaaagaaaacaaagagctggggcgtcagctcgcactcagatatatcatcttcggcggcgaggcgcttgagctgagccggcttgaggactggtacagccgccacccggacaataagcccgtgctcgtgaatatgtacggcattacggaaacgacggtgcatgtcagttatcttgaattagataaaaacattgccgaactgaaggcaaacagcctcatcggctgcggtattcctgatctgaacgtatatgtgcttgatgatcggctggagcctgtgcctccgggcataacgggcgaaatgtatgttgccggagggggcgtggcccgcggttacttagggcggcaaagcctgaccgcggaacgctttgtggctgatccgtacggcccgccgggaacaaggatgtacagaacgggggacttagcccgtctgcggccggacggttcgcttgattatatgggcagggcggaccaccagattaaaatccgcggcttccggattgaactgggcgaaattgaagcggttctcgtcaaacatccgggtgtcgaggacgctgccgtggtcgtccgtgaagatcagccgggagataaacggctcgccgcttaccttgtccgatctgacaccagtaccttggatacgggggacatgcgccaatttgccggagaaagcctgccggattacatggtgccgtcggcttttgtccaaatggatgaactgccgctgacaccgaatggcaagcttgaccgaaaagcgctccctgcgcctgacttccaaatggaggtctccggccgggggccgagaaccccgcaggaagaaatactgtgtgaactgttcgcagaggtgcttcacctcccgcgtgtcggtattgatgacaggttctttgatttaggcggccattctttacttgcggttcatttaatgagccgtattcgggaagcgatgggagctgagctgagtatcggaacattattcgaagctcctactgtggcaagccttgctgaaaggcttgagacgggcacgggcacaagcgcgcttgatgtcctgcttccgctcagaacggcgggagaagaaacaccgctcttctgtgtccatccggccggggggctcagctggtgttatgccgggctgatgtcttctttagaagctgattatccgatatacggcttacaggcgagaggcattgggaaaaaagaaccgcttccgcaaagcttagatgacatggcggcggattatattgaaaaaatccgcaccgtgcagccgaaagggccgtaccgtctgctgggctggtcactcggaggaaatgtcattcaggccatggcgacacaattacagagccggggcgaagaggtttccctcttggtgatgcttgacgcgtacccgaatcattttcttccgataaaaaatgcgccagatgacgaggaagccgtcattgccctgcttgcccttggagggtacgacccggacagcctcggggatcagccgcttgattttgataccgcgctgaccattctccgccgtgagggaagcgcattagccagcctggacgagtcagtgatgatgaatttgaaagacacatacgttaattctgtcggtctgttaggaacatacaagccgaagccgttccacggagatgttctgttcttcagatccacgattattcccgagtggtttgacccgattgaaccagatacttggaaaccatatattacggggaaaatcgagcggtatgacttagactgccgccataaagatatgtgccagccgggcccgcttgccgaaatcggcgcgattctggcggagaaattaaacggacggcgtacagtccggtaaagaaaggaatgagctgatatgacaaatccatttgaacgggaagacggcttatatcatgtgctcgtcaatgctgaaggccagtactcgctgtggccggcctatctggatgtgccggacgggtgggaaacccgcctgacgaatgaaaaccgttccgtttgtctcgaatatattgaaacaaactggcgtgacatgaggcctgaaagcctgaaacgggctgaacctgctaagatgtaataaaaaaagcctgccgttgattcggcaggctttttatgcggaaatcagctgttaagctgtgtatgatcacaaaatttataagggtggccttcttcattcgtgcaccatgactgagacagaaaagccaaaaagaccgcggcccactggtctgcaaactggattaaaataccgccatcatgccacgtcccgttatccttcttccagcgtgtatcaattggatttccctgattcatatgaatattatgcatgccgtttgtcggtttgaacccgaaaatcttatcagcgtcctgctccggcccgaatttagagccgtaaatatagacggtggctttttctgtttttgctttttgcatatacgtttcaataaaatcatttaagtcattatctggcccggtgacttcatgcgggagcgacaccatgttccggggatcaaacaaattgccgcggacataatccagcgccagctcacggcttttgtcatcaattggtgtgtatccatacggtatgttcggcagcagggtgatcgcgcttgcgtcaaaatgatcgcgcgccgcatacagaacctctgattcttttgaacttgacatgacattgatcgcacagcgatagtgcgtatcaggctcgcctagcacctcgacttgaaaatgcggagaatcatcatctgtttcccttctcatatctaacacagtgccttttaatacaccatagtgctgaacagccatatgaatcctcctttttcttccgggatatgaattgatattcgagacagggggccgtttttccttttacgagaaagaaaaaaaggacagcctgctgatcaggccgtcctcttcatatctattaagcttttgcaactgaaccttgcatcgctttttcagcaggcacgtagtcatagcctaagtctttggctaccgcttcatacgtgacgtgtccgttagccgtattcaggccggctttaagcgccgggctgtctgtaatggcttttgccgcgcctttattggcgatttcaagcgcgtaaggaacggtcacattcgttaatgcgagcgtagatgtacgcggtacggcgccaggcatattagcgacagcataatgaacgacgccgtgtttttcataagtcggattatcgtgtgttgtaatatgatcaacggtttccacaatgccgccctgatcgatggcaacatcaacaatgacggaacccggtttcatttgtttaaccatttcttccgtaacgagagtcggcgctttggctcccgggatgagcacggcgcagatcagaagatccgcttccgcgacggagtctgcaatatttacagggtttgagatcaatgttttaatctgatgcccgaaaatatcatcaagctgacgcaggcggtctgcgttcaagtcgatcatcgtcacatcggcaccgagtccgacagccattttcgcggcatttgttccgacgccgccgcctccgatgatcgtgacttttccgcgggatacaccaggtacgccggctaataaaattccttttccgccctttggtttttcaaggaactgagctccgatttgagcggccattctgccggccacttcagacatcggcgtaagcagcggaagtgaacgtccgtccgttaccgtttcgtatgcaatagctgtcacgcctttttctgtaagcgctttagctaattccggctctgcggctaaatgaaggtaagtgaataagatcaggccttgacggaaatacgcatattcctcagccagcggttcttttaccttcatgaccatttctgcatcccatacttgctttctgtcttcaagaatttccgcgcctgcggatacataatcttcatttgtaaagccgcttccgagtcctgctccggattccacaagaacccgatggccgtttccgataagctgtgaaacgcctccaggtgttaatgccactcgattttcattgtttttgatttcctttggaaccccgataatcatgtctgtttcccccaatgtttgtgtgatgcttcaagtgtagcgcgattgttgcgaaaattctttgtttgaaacagaaaataaaaaaacacggatttgtgaaatttcacgaatccatactgcgaagcttgatatcgaggtaaatcgtaaacttttcattcacattttttaagtcgatttctgcgatctggctgattcttttcagcctgtaattcaatgtattgacatggatgttaagcgctttagcggcggtgttgacattgctgtcggcatcgataaaatgttcgagcgttttgaccatatcggcctgatgctctctgtcatactgctcaagctttgacagggaatagttcatatagccgctgtgcttgcgtttttcatccaaaacatcaaggtactgataaatcccgagttcagaaaagctgaaaaggtgtttggtttctctcacaaaccgctctttcgctttcaatacggagagcgcttcctgataggagcggtaaacgtaagaaatcgattcgtaaataccgccgaaagcaatcgacgcatcctcaattttatatcgttctttcagctgtttttgaacatggagggcgaactgttttaaatctttaaaaggctgatcggatttcggcgcggctaataagattaattcattcgaatcgacagtcgccagcatgacatgaatctgctgtgtcgtttcctgcaaatattgcagctgctgttccgtcttttcagtcagctcatcatgtaaacggatgatcatgacgctgaacacggacggcagcgccattccgagcttatgaaacccttcggccatctcggcttcctgataaatatggccggtcagcattttccaaaaaaactcctggccccgctcttcgatttttgttttgcggatctgcaggtgcaaaagcttgttccgcaccgctttggcggccagctgaagcgtcttcaggtcctcatcattgagcttttttttgatctcaagcgcccatataaatccgagaacctggctgtttttccaaatggaaatcgccacgcggttgctcaggcccacctcgtcgatttctttcactttgatcggctggtctgtttttaaaagcgccggaatggttccgtctttccacagtttgttgatgactttttcaggcaccctccgtccgataatcgtcgacgtccgggccggatctgtacaatcgctgtgcgtgctgtatgcaagcagtttatgattcacgtcttctattgtaatggggcattgaagaacttcactgatatggtcggcaacatcttcaagcctgtcgaaactgtacttaaatggatcttttggattggtcatctgtatccctactttttcatagcttcatatcttgatcttaccatcttgcttttcagactgaaaggcatctttgaacggaaataaaataggaaaatcagatcatttgacgaaatcaaaaagaataagaaaatcataccattatatttacaaaatgtgtaaatgtgacgaaaaatcctgtatatcataagactcattttgtaaaattaaaacagatttgtttgactgtgccgaattgttgtttttataataatgacgttcaaaaaataagtgaattagcccatatttaggctgatgacacaggagggtataaggaatatgtctggattaattcgtgtcacacccgaagagctaagagcgatggctaagcaatatggcgttgaaagtcaggaagtcatgaatcaggttgaccgcctgaaccgcatgatttctgatttgaaaggcatgtgggacggtgcttcaagtgaagcatttgcggatcagtatgagcagctgaaaccttcatttattaaaatgtctgaattgctgcaagatgtgaatcatcagctcgaacaaacggcaaatacgcttgagtctactgaccaagatatcgctaaccaaattcgcggataataagatgaatgaagaaacggagcgcctgattcaatcaagaagacggcgctctttctatgtaagggtgatatgaaaatgtatatcgatattacaatagatttaacacattataacggcagcgtcttcgatctcagattgtcagattaccattctgtgaaaaaagtcatcgatattgcccggcaggctcagcatgtatccgttccgccgcgtgaaggctattggatcagagtggtcaataaagaaacggttttttccggagaacaaaaattatctgactgcggcattacgaacggagaccgtcttgaaattttatgagaggacatggtggaatgacagatcataacagatcttatttagaaactgaattagacgccgtccgggcagaaaccgaatcaggcttcaccttcacctttcagcgggaaaaagtcaagcttcttgacgggctggaagcaaacgtgattaaagatgctgatcctttttttcaaaaagaggtttcagtctcagaagacgaagtaaccataacaatcagacccccttcttcttatcaggctttccgctatataaaaggaaaagataaaaaaagcagatggcaatttgcctaccgtctcgtgcaagctgtgaaacagcacaagctgaaacgcctcaatctgattgccgcgccggaaaatatcgtatttgataaagcgctgacgccttactttcttcattacggcgtaaaggagagtctcccgccttatgaagaagacagacaaagggtgtggaaagagctcaaagcctgtgcggcgcttgcagctgacggggcgtacaccttcgaagaatatctgaagtacaaggagacgcttcaattctctcctgaggtgaaaagcgtgttagaggctgagacgtttgaagaactggaagaaaccattcaaaccacaattgattccctcgaagcaagggacaagacatacataaaactgccgaaaaagaaatggaaaatccaaagatacgtcggtctggcgcttgcagttcttcttgtgccggcacttctgtattccttgtacgtgctgtttttcgcccagccgaagcaagaggcaattacggaaagcaaccgctattttctcaatcagcagtacagcaaagtcattgacacgcttgctaaatacaacgcggaaagcctccctgaatctgtgcagtacgagcttgcttcctcttatgtggcagttgaaaatctgagcgaagaacagcggaaaaacattgggaatctggtcacgctgcaatcagatccgaagcacttcctttattggatcgatatcggcagaggggaaaatgaagaagccatcaatatcggccgcaatcttgagtacaacccgtatatctggctcgggcttacaaaatataaacagcaattattagcggacgacagtatgaaagacgatgaaaagcagaaagaactggacgccgtggaaagcgagctggcgaaggcgaaaaaagagcaggaagagcagaacaaagaagcggaggaaaaccgtgacaccgtcgaagcttccgccggacaggataaagatggcaaaaaggacgaagcgaaggataacaaagagaacgacaagaaagatgagaaaaaagatgaaaaaaaataacagcacacatcaaatggccgtaagtaacgatcaggctgtcaggaggttcgccatatgagtctgttatgggtcttttaccgagagcacgtacaaaagattcagctgtctgaactcccgccgtctcagccgatcacgatcggcccggatataaaggatacgatcacgatcggcacactgcctttacggcaaaccgccgccaccctttatcgtaaagaaacagaccgttatgatgttttcctgggaaataactgtgccggcgaattgacaataggaaatgaaatgccttgcagaatggaagaagagacgatgcggcttcttctcactcctgatcaggaagaatcctccgtttattttgtcggcggaaaggacgagatcgttttctcatcagaaacagaggaagcggatatatacaaagagccgtcgtccgctcaaaaaggcgctttttatctccgaaaagcgggaggaagctggtctgtcattcctgatggtcaggaagtttatgtaaacggagagctcacaaaagtccctgaaaggcttcggatgggagatgagctgctgtggaattttctgcgtctgaggctgacggaggacgaccttttagaagtcgttcatcacgaggagtttcaaaccggcttaattaaaacgataaagccaagcactgaaatgaaaaagaaatacccgcaatatcgaagaacgccgcggatggtctacgatcttcccgaagaccgcgtttcattcagctttccctcacaggaaagcgagcagaataacagggggctctggctcgtcattctgcctcctgtggtcatgctgattgtaatgggggttgtcgccattatacagccgaggggcattttcattctcgtttctttagcgatgtttatgatgactctcattacgtccaccgtgcaatatttccgagaaaaaaaccagcggaaaaaacgggaggagaagcgtgagcgtgtgtacaagcagtatttagagagtaaacggaaagaacttcagacgctgtcggaaaaacaattgcaagtgctgacgcaccattttcccacgtttgaaaaaatgaaatatttaacctctgaaatcagcggccgcatttgggagaaatcgctggaaagcagggattttctgatgctccggctcggaacgggcactgtcccggcaagctacgagatctcgatgagcggaggggacctggcgaaccgtgatgtggatgacttaatggaacagtcgcagcacatgcagcgtgtatataaagatatccgccatgcacccgtgaccgttgatttacaagaagggccgatggggcttgtcgggaaaccccagatcgtcaaaaatgaaattcaccagctgatcggccagctcgctttcttcaacagctaccatgacctgcggtttgtctttatctttcatgaagatgaatataaggaatgggaatggatgaagtggctgccgcaatttcagctgcctcatatgtatgcgaaagggtttatttacaatgaacagacccgtgatcaattgttatcttccatttacgagctgctgcgggagcgggatttggaagaagataaagagaaaaagatcttccagccgcattttgtctttgtcatcacgaatcagcagctgatcgcagagcacgtcattttagaatatatcgaaggccggcatgagcatctcggcatctcagcgatcatcgccgcggaaacgaaggaaagcctggcagaaaacattcacaccctcgtccgctacattaatgaagatgaaggagacatcctcattcagaagaaaaaagcggtccagatcccgtttaggctggacaggcatgaacggacaaacaacgagcggttttcccgaacgcttcggacattgcaccatcaggtcgggatgacgaattccattcccgaaacggtctcatttttggagctgtttcatgcgaaggaagtaaaagaaatcggcatcaggcagaagtgggagacaagtgagtcggcaaaatcactggctgttccgatcggctacaaaggtaaagacgatatcgtgtatttaaacctgcatgagaaagcccacgggccgcacggattgctggcgggaacgaccggctccgggaaaagtgaatttctgcaaacgtttatcctgtcattggccgttcattttcaccctcatgaagcggcgtttttgctgattgactataagggcgggggaatggcgcagccgtttcgcaaaatgccgcaccttctcggaaccattacgaatatcgaaggaagcaaaaacttcagtatcagggcgcttgcctctataaaaagcgagctgaaaaaacggcagcggctgtttgatcaatatcgcgtcaatcacattaatgactatacaaagctgtataaacagggggaaacggatattccgatgccgcacctgtttttgatttcagatgaatttgccgagctcaaaagcgaagagcctgactttatcagggagcttgtcagcgcggcacgcatcgggcggagccttggtgtgcatttaatccttgccacgcaaaaaccgggaggcatcattgacgaccagatatggagcaactcacgctttaaggtcgcgctgaaagtccaggatgcaagtgacagtaaagaaattctgaaaaacagtgatgcggcgaatattacagtcaccggacgcggctatttgcaagtcggaaataatgaagtgtatgagcagttccagtctgcctggagcggcgccccttacatggaagatgtatacggcaccgaggatgacattgccatcgttaccgataccggcttaattccgctgtctgaagtggatgcggacgacttggcgaaaaaagacgccccggcagaaatagaagccgtagtagaagaaatcgagcggattcaaaaagaaatgggcattgaaaagctgccgagcccgtggcttccgccgcttgccgaacgtattccgcgcacgctttatccggcgaaggaaaaagaccgcttcttcatcgcctgcgttgatgagcctgatcagcaaagacaggcgcctctcgcctatacgatgatggatgacggcaacatcggcattttcggctcatccggatacggcaagtcagtggctgccatcactctcctgatgaacttcgcggaagggtacacgccaaaagagcttcatatgtacatctttgacttcggaaacggcacgcttctgccattggcaaagcttccgcacaccgcagactatttcttaatggatcaaatgagaaagatcgaaaaattcatgatccgcatcaaggaagaaatcgagcggcggaaacggctgttcagagaaaaagaagtcagccatatcaaaatgtacaattcgctcagcgaagaagagctgccgtttatatttatcacaattgacaatttcgacatcgtaaaagacgaaatgcatgaattggaaacggaatttatccagatttcacgcgacgggcaaagcttaggcatttacttcctgctgaccgcaacgagggtaaacgccgtccgtcagtcattgttaaataatataaaaacgaaaatcgtccattatttaatggatcagtcagaaggttattccatttacgggcgtccgccgttcagtctcgaaccgattccgggacgcgtcatgattcaaaaagaagaactgcatttcgcgcaaatgtttcttccggctgaagcggaaaatgacctcgagatgttccaagcgctgaaagccgatgtcaaagctttagctgagcgccatgccggaacagccggtccaaacccgattccgatgctcccggacatgctgacggccggcgaattttcgctccgtctcggcccggatcaagaaccgttccgcattcctgtcgggcttcatgaggaaaaggtcagcccggtatactttgatctgggcaaatataagcattgcctcatcttaggccagacacagcggggaaaaacaaacatcctgaaagtcatgctgaatcacctgctgcgtgaaagcacggaacggatcggactgtttgactcgattgaccgcggattgtcgcagtatgcgcaggaaacaaaggtcagctatctggacacaaaagaagacatacagaagtggattgaagcggctgaagccattttcacggagcgggaagctcagtatgcacaggccgtcaaaaatggcgatgtgcacaaactcaatttctctccgatcgtgttaatggccgacggcattacaagattccagcagacaatcgacaccgccattcaggacaagctggcgatgtttatgaaatcttacgcgcatgtaggcttcagttttatcccggcgggcaatcacagcgaattttcaaaaggctatgattccttaacgacggaaatgaaacagatccgccacgcgatgctgcttgtgaaaaaatctgaacaaaatgtcattccgctgccttaccagagacaggaaccggacattcagccgggcttcggctatttggttgaaaacggcaaggagcaaaaaatccaaatacctttatgttcagcggaaagggaggccgtcagatgactgaacaacgaaaaagcctgatcaaattagtagccgcgatcgtcattattctgctgctgccggtgctgtttttccggtttatcggcgatgacccgggaaaacaaaaaatcaatgccacccgccaaatcgcagtcgtgaatgaagacatgggcttacatgatgaaacagatgaaaatgaggatagggaatcggtccatttcggcaaagaagtagcggcggctctcggcgaccgtccggattattcctggacggtcgtcaacaggagcgcggctgaaaacggcctggcggataagaagtatgacgcagtcgtttacattccatccgatttttcaaaagacattttaagctatgacaaggagcgtccgcaaaaagctacgctgacattcaatattcaaagcaacctgaacgccgtcaacaaagaaaaagtgcagcgtgagcttgaagacgcccaaaaatcaatgaataaaaaaatgtcggcattgtattggaatttcgtctcacaaaaagtgaacaatgtcagaggcgattttgacaagatcgtcaataaagaatcagaatttcaaaatgtcatgtacaacttttacaagccgagctccaatgacttggcaggtgagatcaaacggcaaaaagacctgattgacgaactgaaaaaatcaatgaacgaagcgcagggcgcagcaaaagaaaaattgacctcggcagatgaagccaaaaacacgctcaaagactttgccgatacagttgagcgctataaacaatatcaggaaaatcagaaaaaactgctgctggccgcgcaggaacaaaatcaaaagcaaatcacaaccggactgaacgctattaaagcgcagcaggccgccaaccagttcagcaccatgatgagcgggctgtcttcaggcataaaccgggcgcagacacagcttgaccagacaggatcggcactggcagccgcccaaaaggtgagagaagcgcaggtccctgagcaggaacaagggatggcaaatattcaatccaatttacttgacaattatttgactcaatataaagcccaagcaagatttgaaacactgaacagcattcaagcccttatgaaaagggatcgccagaacttaaccgttccggaaaaagacccgggggatgacggctcggatgaaccgaaagaagaagaaaaaccggaagaagaaaaacccggtgatctgaaaattgaccttgacgatcagcgtaacgaattaaaacgcatctccgctgagatcaattctatttctgacggtttaaaagaaccggaaaaagaaaatccagaccctgaaaacccgggccatggggataatggtgaaaactccggcggtaccgaaccgaatgacgggacggctcccggagaagacggaaaaacggatgacggcacaaaagaacagcagtctccttccgataacacaggcgatcagcagacaaaaacagccgcaaccgctaaaaacgtcactccgcttgctgatgaccccgcggacgatccgaacggctctgaaggagacggcggcacagaagtatctaaggcaaaagaaaggctgaaccaagccgcagagcgcattcagcaaattgaaaaagagcttgaagagaaacagcagacacataatgaagaactgaaaaaacgtctcgatgctcttgatgaagaaatccaaggccttaaagaccagattgccaaagttgaaaaacgtgcggacaaattacaaaaaaagctggaacaatcagaagaaacgagaaaacaagacttcaataccgtttacagaatgattttaaaaacagaacagaacattttgaactacccgtcattggacggcggccgcaaatctgctcttgaacagatatttgccgctgacatcaatacaaaagtgatatccgatttaatgagttactataatgatttatctttgtatgaggcaacactttatcattctctcgacgcaggctcgctgcctgatgtgaaaaacagggtgctgaaagcccagcaaggcgaagtccaaaccgttctcgccatcaaaccgattgaaacggcaagctgggaaaacctgaaaaacaataagatgcagacagatgaagacatcagcaatttcattaaaggcatgaccgaattctcggataactacagctcatatatcagagatgaacaagccggagtgctcgatgagctcgccagcatcgcagacagcgcggctaaagcatctgatcagcttgctgaaggcgctgtgcaggaagcggcaacgttcagcggagacggattaaccggaacgatggcgctcggcgctcaggataccgtcggccgcgaagtgctgcaaatgtctgacacgatgggccatctgtcagaacgccagtccggcatcatcagctataccgacaatatgcagcaaagcgtaaatgacgtacagcagaaagcggacaccctgaacagcaattggggcaaaaacgtcgattccacaaaattgatcagaaatgacgtgtacggcattttagggaacgcgctcgttgacggacaggaaaacggatacgtttacgattatctcgccaacccgcttaaaatcagcggagaggtgccggaagaccgggttcagaatgttccgccggtcgtcattttggtgatcgttttgatcagcagtcttctgatcggctatttcagctcgtattatcagcaggcgccgcttctcgtcaaaggcgcgctctttgggattttaaacattatggtcggactgatgatcagtctgttcggtctgaatatctactcgcttccggacgatcagacgattaaatggtcaatctttacgattctcttgctcgcggcgagttcggcttttatccgggcagcctttgtctttggctcgatcaccggatggatcgcttcgtcagcgctcattctcttttatgtggcgcctttgatcgacttgattatgccgaactttacctttgacagcccggtttcgaaagtctatatcgatatccaatacggtacgggccatctgtttgcgatgggaataacggttcttgtgattattacgctgattgcggcggtgcttccgctcattattcggctgtttgcggaaaaaacggaggaaagtgatcagtcttatgaggcgtaacacattcatggaaaaagggatcttgctgtttgctctctcctttttccttttccttcctcaagccgcagccgcgaatgaggacaatactgatgtcaagccgaatgaatatgaaaagaaagacattgaaattcgtacggattacctgcacgacgacgcctactccgaagaaaaaacggcgcttccgaaagagcagaaggacattacgtttgatcaaccggccgaaagcccggatgaaaaactgatatcaaatttgtttacatcgtcagacactgagccgaatacgatcaaagcgcaatcgaaaaaactggggatcacttttgccgagccggcggtgcgccatacctcggcagatatggaagcggatgagaaaaagacttcttttcttttgcctgtcatttatgccgtcctgatcctcttcggcattgcggcgatgatttatctgattccgaaagtcacggcgcaggaaaaggcaaagcggtaaacagatcgcttgtgtttgcgggaagacagtccgtaaaataagaaaaaaaaggaggagtgtcatgcagttttttctgataacaggcgcatcaaaaggattggggcgggcgcttgcggaacaggcgcttcaagaaggagccgaagtcgccgcgctttcaagaacgataagcggagaaaagcgcgagggactgacagaatacagtgttgatttaaccgatctgtcagacaccgagcggcagatgaaggcgattcttgatcaagctgatgagaagcggtattccgccgtcacactgatcaataatgccggaatggtagaaccgatcaagcgggcgaaagaagcttccgcagaagaattgaaccgccattacacccttaatctgacggcgcctgttttgctcagccaaatgttcacgaagcgtttcgaagcgttcaccggcagcaaaaccattgtcaacatcacatcgggcgcggcgaaaaatccttataaaggctggagcgcgtattgcagctcaaaagctgggcttgatatgtttacgagaacattcgggtttgaacaggaagatgaagagctgccggtccgcatgttgtcattctcaccgggagtgatggatacagacatgcaggccgtcattcgttcttcatccaaagaagattttcacgacatcgatcggttccgcaatctgaaagaaacgaacagcctcagaagtccggaatacatcgctggtgtcatccgctcactgatcgcaggagagccggaaaacggacggatatacgatatcaaagagtttttgtagagcagcttccgcgctgctcttttttatttgtacaatcacttcgcggcccggcggcatattatgactgaaacgcaatataaggggtataataatgtatcggatgaattgagtttcttctcgatttatgttaggattctaaaaatataaataaggaggggtttccatgagaaatgtaacgttaatggatgtcttcacccatccaatcgcacaaaagtatttacagcgttccggcgtcgcccatgcggttgcctgcgcgtttcatgcataccgtcttgccgtaaaagcaggtgtcagcccggatcttgcggcgaaagcggctttactgcatgacatcggccattacgaatggtacacagacggcaaatgggattatgaaaagtacagaagaaacgatatccatgccattaaaggcgctgaacgggcgcataagctgctcatccggctcggtgaagaaccgaaagcggcgaaagagattgcgctggcgattctgcttcacaccgattcctatctgcctgaaggcgaactggacaagaatacgctccagcaaattgtgaaacaagcggatgaactcgatgaagaacccggcggacatcaccattaccgccaaatggaccatacggccgcgctcaaacaaatccaaaagcttgatcagttaattgaccaagcccaatatcccataagaagctcagtctaggccactcatgcggccttttccgcttacataactccgcatgctcactaacccttttcccctccgatagacgtactgtgtcaaagcctttgtccgctgcatatgctgaaggaaaacatagtaaaggggatcagcgaaaatggcccatcaaggaagcccgcaaatcgtctcgttagtagatccttacgtttatcagaccatccataagcttatcggctcaaggtttatcattcaaaccgtcagacgcattgtcaggggacggctgattgatgccactccagatcatatcgccattgaagaaacgcatgaccgcgtattttatatcagaaaccgccatgtggtttctgtcatgcctgattataccgaacgtgtgtaacagcccgataaggcgcaaaccggaggccgtccttacaaaaccccggtgcgtcttcttttttgagatacatagatgcacggcggctttttttggtacaatcacagtacaagttcacataacaataggaggaaaccgcttgttgaaatcaaaggtccatttttggacgctgcaaattttgctcgttttgctcataatttacgtatcaacgaaagtctcgtttatttttcagccgtttttcggttttatcaccactctgttttttccgattctgatctcgggcattttgtttttcatttttaatccgatcgtgcgcctgcttgagaaaaaaatcccccggacattggcgatcctgctcatttatctcgttttcatcggcctgatagcctttatgttcaccgcaatcggaccgattgtggcttcccaggtcacggggctgtttaacaatttccctgattacattaatcagattcaaagcttgacgacacaattatcccattccaaatggtttacgtggatgatgacgcaggattatgtgtcgatagaaaaaattcagcagtctctgacgggatttttacaaagtcttccgcaaaatattaccgcaagcctgtccgccgtgttcggcgtcgttacgaatataacgcttgtcgtgatcaccgttccgttcatcttgttttatatgctgaaggacggccggcgttttccgctcttggcggtcaaaatcctgccttcttcctaccgggcggaaggtcggaaaatattcaatgacttatatgtcacattggccgcatatttccaaggccagctgctgatctgtctctttgtcgggacggcatgctttatcggatattggattatcggcctgccttacgcgttaattctcgggatggtgattgccgtcaccaatatcattccgtacctcggaccgtttctcggggctgcgccggcggtaattatcgcgtttatggattctccggctaaggcgctgtttgccgttattgttgtcgttgtcgtccagcagcttgacggaaacctgctttctccgcttgttatcgggaaacggctcaatacccacccgctcaccattattcttctgcttgtcggagcgggcagtttcggcggcattctcgcaatgattctggctgtgccggtttacgcggtcttaaaagcattcgtcttaaatatcgtccgccttatcaaacttcgtcagcggtcaaaacacgaagacaaccgcaagccgaaataaaaacgggcacaactccgcacgcgccgcataaaatgctgtaaagaaaagcggaggtgtgggtatgcctgcaattgtgggaccgatttatattatgagcttagccggagacgctgcggcgagcttcggtgacgtgtttgccatttctcccaaagccgttgaccactcaggcgcgggggcaggggcgtttcattccggagattttgtcaaagtcactaataaattcagcaaaacgctctttgaagatatcgatctgtttgacgaacctgattggtttaacgcgtgacagcctccctttaggaggctgtcgcttttttgtagtataatagaatcagtctttataaaaggggaatttttatgaaaatcagaaaagcgaatattaccgtgcagtccggaatgatcggcgatgtgtatctgcatgaaaataaaaaagaacagcataccctcgtagccgttccggaacttgagtggagcacgattatttcctatgaggaagagaaaaaggcgctggcgcagcggcttttacaatcattcagcaaactgattgatgaagagcctgccggagagctcgccggcaagatctcccattgggtcgctgaaatgtaacgaaacggtttaccgcgtccatgccggggcgataattgtaaaacaagctgaggagggacaggccgatgagcgacaaaacagttgacctttatttacagcagggtatgtatggccctctgcagacgaaaccggatgaacgccatttatttttaggctcgctgcgtgaaagagtcatcattgccctgacgaaggggcaggtgctgcaaaagaagccgtatgaagaagtgaaacaggcgctgaaaaaccgaaaagacgcggtgctgtatataaacggaaggctgccgtatcatgcttattcaccatatatgaagcttgccgcactggacggtgtccgaagctcagtgatctcggaccttcaatttgaaacgccgctcggcctggtttttgccgccgatcatgctgtgaacctggacggcatttatgttcaggatgacatttttcagcgttcactcctgaaataaatgtcattttacaatgccaattcacttacaggtggagataggatataatggttttcatatgaatggcggggaggccggctatgaaaaaagcatttatatgcattgattatacgaatgattttgcagcagagaacggagcattgacgtgcggagaacccgcaaggcaaattgaagatacgattgtcagtttgacgcaagcttttatagaaaacggtgattacgttgtttttgcggtggattcacatgatgcagacgatgactttcatcccgaaatacgcctgtttcctccgcataatatcaacggcacggagggcaaggagctgtacggaaagctttcgcctctttatgagaaacataaaaacgcaaaaaacgtaagctatatggaaaaaacgagatattctgcttttgcgggaacggatttagagctgaaactgcgggaacggcagatcactgaactgcatcttgcgggcctgtgcaccgacatctgtgttcttcacacggcggttgacgcctacaacaagggctttcagatcgtcattcatcaaaacgctgtggcaagctttaatcctgaagggcatgaatgggccctgtcccattttaagaacagcatcggagcgcaagtggcagagtaaggaaggggaaaataattttggtggagcatggttttaaagacgacagtttgtctttacatacagatctttatcaaattaatatggccgaaacgtactggagagacggcattcatgagaaaaaagcgatctttgagctttttttcagaaagcttccctttgaaaacggctatgcggtatttgcgggcttagaaaaagcaatcgaatacttggagaacttcaaatttaccgacagcgatctgaattatttaaaaacggaattgcactatgatgatgatttcattgagtatttacgggatctttcttttaccgggtctctttacagcatgaaagaaggagagctcgtttttaacaacgaaccgattatgcgggtcgaagcgcccctcattgaagcgcagctgattgagacggctctgcttaacattgtgaattaccaaacattaatcgcgacaaaagcagcccgcattaaaggcgttgtcggtgatgaggacgcccttgaattcggcacgcggcgcgcccatgaaatggatgcggctatgtggggagcgagagcggccctgatcggcggcttcagcgcgacgagtaatgtaagagccggaaagcgctttaatatcccggtatccggcacgcacgcccatgcgctcgtgcaagcgtaccgtgatgaatatacggcttttaagaaatatgcggagacgcacagagattgcgtgtttctcgtagatacgtacgatacgatccgttcaggcatgccgaatgcgattaaagtcgcgaaggaattcggcgaccggatcaacttcatcggcatccgcctggacagcggggacttggcgtacctgtcaaaaaaagcgcgtgaaatgcttgatgaagcgggtttcaaagacgcaaaggttatcgcttcaagcgaccttgatgagcatacgatcttaaatctgaaatcgcagggagcgaaaatcgatacgtggggaatcggcacaaaactgattaccgcatacgatcagccggccctcggcgcggtttacaagcttgtggccattgaagaggacggcaaactgaccgatactatcaaaatttcgtcaaaccctgaaaaagtgacaacgccgggaagaaagaaagtataccggattatcaacaagctgaatcatcactctgaaggggattatatcgctctttatgacgagcgggtaaacgaccagaaacgcttaaaaatgttccatcccgttcatacattcgtcagtaaattcgtcactgatttctatgcgaaagacctgcatgagccgatttttgaaaacggcgttttatgttatgataatccagaaattaccgatatccagcaatatgtccaggaaaacctcaaacttctgtgggaggaatacaaacggatcagcaagccggaagaatatccggtcgatttaagtgaagactgctggagcaacaaaatgcagcggattcatgagatcaaaagcaagctgaaacgggagcttgaatagatgataaaacggcctttcctttctctggaaaggctttttgtttgtgataatatttttcacatttagacaaatttcgtcaagttatttgatatacttatgttcgaaggccgcacctaagggggtaaatgaatgaaggtgtttgttgcgagacagcctatcttcaacagaaacgaacaggttgttgcttatgaacttctttaccgggagagtgaagagaaccgttattcggccgcggacggagataaagctactacagatctcattataaacagctttatcaacatcgggatcgaaaagctgacagaggggaaacgctgctttgtgaattttacagaaagcctgatgttttcagatctccctacctcctttgatcctgaccagctcattatcgaaattcttgaagacataccgatcactccggcactgatctcaagatgcagacagctgaagaaattaggatatacattagcacttgatgatttttacgccatcaatccggcaaatgaagaattattggaacagctgatgaaatatattgatattttaaaaatcgatttcctgcaatcttcgcgtctggaacgcaaaaaaatcattcagacgtacagctgtaaaaatctgatttatttagcggagaaagtggagacaagaaaagattataaacaggcagccatagacggctttcacctgtttcaaggatattttttcagtgaaccgcgtgtcatcagcggaaatgatctgacgtttcattttcattcttactaccagcttttaaacgaattaaaccaagaccagcccaatatagagcgcgtaacggaatacatagagcgggacgttacattatcgtatcagattctgcgttttttaaacggatcgcaaacaaggctgaaaaaaaagatagacagcatccagcaggccatcatgatgcttgggctgaatgagattaagcgtttgatttacattctttcattcagagatttaacggcgaaaagccactcaagccaaaaagaaatcattaagatttctttaatcagggccaagctgtgcgaactgctggcgaaaagaaccggaagaccgcagccttcctcttacatgctgatcggcatgttttcactcatcgatacgcttctccagagagagcttgaggacatagtcaaagaactgcctttaattgatgaagtcggacaggcgctgctcggttatgaaaacgattattacatgatgctcgggctcgtcaaagccattgaatgcaacaactgggactgtgacgagtggggaaaagaactggacaaagaagaagcatatgaatgttacttacaggcgatcgaatggtgccggcagcttatcgtgaattgaggcgctttaagccgaccacctgagggcgatgatgaaccggctttgctctctgaacagactgacacggatgccgtcgggattaaatgtcacatcaaaatcatttttgatgccggtctgcttaatgagccgcttgaccgccgcggcgtcagatgattgcgctgcggtgaggatgcggcgcgcaagctcttttgacgccgacagccgcgcaaggagcaggcgggcgtcctccagcatgcccgcagcctcttttgcggacgctgtcaaaatatctgcgtgaatcgtgggagcaggcgcaggattgcggtatggcgcggcgaaaacaggacagcatggatacacataaagcatgcggcggcctccttctgagataacattcgttatacatgagtataggcggcgtgataacgagttatgacatgcaaaaagaccacaatgcgggtgttgcggtcttttcggtgtttgtcggtggttatgcgacgctgttcgcccattctcttttgaaattgcgacgtcagggactatagtccttagcggtttgtcggaaaaccgttaaaaaaccagcagaaccaccagattgatctgcttcatcccaaacgtctgcctttatggtagttatatagtcctgttcgccaaatgctctgttcgggactatgggattaccgtggtttgcggtgtcacgcagatacttttacacatacttttcggtgaaaaatcccgcaaaaacgtttacactattagtaacagatcaaatacctaggactcgttcaccatacacaattcattgatctttcaaaaaaaggagtgtggaaacggtggaaaagaaattagaagaagtaaagcaattattattccgacttgaaaatgatatcagagaaacaaccgactcattacgaaacattaacaaaagcattgatcagctcgataaattctcatatgcaatgaaaatttcttaaaaagacttggaaacaagtcttttttttgtgcatttttcacccatttcatggataaagtattatacgattgttaaaaaacgaaaaacctgctgtctttcatcacctgcatttagtaaaatagaatgggagggtgaagacaattattgagcaaatgtgtttagatgccgaaacgattaaagggaagatgaaggaaattgttggggataaagtcgataatctacatttagaagagactcttttgaccttcattaatgaaaagaagcacttttcattcggtgtccttgctttccagcattatgttgcttttaagggtacacattcctcggaaatcacactactggccgctggaattgaacttttaattttagcttttgatatttttgacgatattgaagatgaagataactttaataaggcatggatgcaaactgaccatgctatatccctgaatgcggctacttctctgtattcaataagcctgcaagccatttgtgagcttgaatcaaacatcgatttttcaagacttgcaataaaatatgccctaaatgcaatgcaaggtcagcataatgatctaagaaatttcccggagactgaagaagagtgtttacatatgataaaacagaaatcaggatcgttaactgcaatgtcagctgttttaggggcgatgcttgcaagtggtgaatttaacgcaacaattgagaattattcttataaaattggcgttattaaacaaattgaaaatgactattatggtttatttgataaaagccgtagtgatataaagaagaagaaaagaactttgataaacttgtttttaaatcgtcagtttaatagtgcctcaaaaaaagttttaaatatgatgaattctaaaaacagctattactctctcatatcggacagaaattattttgaagaattgctgtgtaaagcaggagtcagacaatatgttttaatgttaattaaaatatatgaaaatgaaatttataacgaaatggaaaagttgaacataagaattaaactatggtgagaattatgggggagtaatatgaagaaacaagacattgtgaattatcttatagaaaatccaagagtgatccatcaattggaagagggggaagtttgcttgatcggaattccccattcaattatccccgcgattatagaaatattcagtaacagcacttataagaaaaaacctgaatttacattttgggatcaataatttttaagagagttgtgatccattgaggtattttattaagcatctttcaatcgcactgttgatatttagttttttctatattgcacatattatatactttacccagaatggaattttagtcggaacctatgttgttgaaacatcaaaacatgagtttgaagttgttaaaattacaaaatcttcttacggaagatacttgaatttaaaagaaggggacaaaattctacagataaatgggcacatgccttcttctcaaaatatcaaaaatggttatttagcaaaggctaataacttaaaggttgagagacgtaatcatgaaattcaattgcatggttcagaggatttgtctttaaacagttcagttagtttctttatttatattgtcccttgtatattatttgcactaagcttattatgtattttctatatatacaaagtcaatcgtataaaaaatacagtttctgcttatattctaatctgcttcttaatttttatatcgatagcttatttaagtgcaggcggtgtaacaagaggatatgagataaatagatatgttaatctttttacttttttaaatgtgcctgtactatacctgcattttttatatcaatattttaaagaattaaaaataaaattttcagcaaagagtatagtatatattctttactgtttacctgtccttaacattgttacagaactttttagatatcgatatgatttatactttgttagagacatgaatttattgtcattttttatcgagatactaatagtgtatatgtatattgtttattatgccattatttatagaaagagagatcatgcttatctattaaaagtgttactaatatctaacacaatagcttttttaccatttactgttctttatcttctttctgaagttattttaggacagtatatttattcagctatagtaactgctccgtttctgctcattattccattggcattggtttatcaatttgttgtcaacaagatttatgatatagattttttgttgggaagaattagatactatagttttttgtctattgttcctacaataggggttgtatggctgtcaatcttatatgaaagtaaaggtaatcattttaacaccattcaaatcactttatatgtgtttttgatttttttggcggtcttttacaccaaagaggttttagactataaattccgtttgaaacgtttttcagaaaaatacaattatcaagacagcatttataaatatacacagcttcttaaaagtgtgtcagctttaaatcaagtgtttatgaatctgaaaaagactatattggatgtattacctgtaagtaaggcttacatttttgaaatcagttcagacggagatattctttattttgataaacaaaacatcgaaccgaattggcagccgtataaaaaagaatttgataaagtcacatcagagattgggaagataattgaagtaaatcaaggatttctgatgaagattggagaaagaggggcaaattcatacattttgctctgtttatccagcattaataccccaaggctgacaagggatgaaatctcttggttaaagacattgtctttttatacaagtgtttcgatggaaaacattttacagatcgaagaactcatgaaccatttacaagatctaaaacaacaaggttcaaacccggtctggctcaaaaagctgatgtttacgattgaggaaaagcagcggtcggatttggcccgtgatctgcatgattcggtgctgcaggatttgatttctttgaaacgccagtgtgagctgtttctggccgattttaagaaagaagagccttgtcacatagaggtgcaggacaagcttcatcagatgaatgagcagatgtcggatgtgattttgatgacccgggagacgtgtcatgagcttcggcctcagctgctgtatgatttgggtctggtgaaggcggtatccaagcttgccgctcagcagcaggagcgtgcgccgtttcatatccgtctgaatacgggacggtttacggcggcgctggatttggatacgcagctgaatttgtaccgcatcattcaggaatttctttcgaatgccatgaagcattcacaggcgaatgaggtgctgattatgctgatcagcattcaaaataaagtgattctgcattatgaagatgacggggtcggatgcaatcaggaggaaggcagcggacaggcgatgagcatggggctttcgggtattaaggagcgcgtccgggcgcttgacggccggatgaaaatcgacacaagtgaaggaaatggttttaaagcggatattgaaatggaattgtaaccaatttatcactaaatcgacttggcagaagccaagtctttttaataaaatggaaatgaatgagtaaaagggaggaaaccatgaaaaagatactagtgattgatgatcatccggctgtcatggagggcaccaagacgattctggaaacggacacgaatctttctgtcgattgccttagtcccgatgccagtgaacaattcgttcttcggcatgatttttcagcttacgatctcatattaatggatttaaatctgggtgatgacctcagcggcatagagctttccaagaaaatcttaaaagagaatcctctctgcaaaatcattgtttacacaggttatgaggttgaagattattttgaagaatccatccgcgcgggtctgcacggtgccatcagcaaaaccgagtctaaagagaaaatcatgcaatacatatatcacgtgcttaacggacagattttagttgatttctcctatttcaaacagctgttgacccagcaaaaaacaaaaacgtcttcttcccctcaaagtgagcaggatcggttaacaccgagagagcgccatattcttcaagaggtcgaaaaaggtttgaccaatcaggaaatcgccgatgcgcttcacttaagcaagcggtcgattgaatacagcctgacatccatttttaacaagctgaatgtcggctcccgtacagaagcggtgctgatcgccaagtcagataacgtactataaaccttgaaaggagaatgacctatgaatctgaaaaatacattgctcggcgcactcggcattgaaatcactgaaaacacggcgggaagatgcgtcgcggttatgccggtggataagaggacggtgcagcctttcggatatctgcacggaggcgcatcagcagcgctggcggagaccgcagccagtgtcggggcccagcattttatcgatcagtcgtcacaggcgtgtgtcggacttgagattaacgccaatcatttaaaatccgtgaaagagggcggtacggtcacggcgattgcgcaacccgttcatacaggcagaacaaccattgtttacgagattaaaatttttgatgaaagagaaaggctgatctgtgtttcccgctgcacgctggctgttataacaaaataaacaaacagccggaaccctgaatcgtccggctgtttgtttttacaaatatgaatctttttttcgtttgatcacaaagtttctgatccctttataatcatcctgaacgcttcttttatcaagcgccgctcctgaattgtacgccgccctgcagatgaggtgcgccccgaccggagccgtcagcaggataaaaatcatcccgagcagtatttttacagaaatttctccggtcagcatccacaagtaacccaaaacgccgagcaatatcaaattaacgccgagtgtcgagccttttgaggaggcgtgggcgcgtgtatacacatcaggaagcctgagtgtgccgaaagacgcgaccagacagatcagcgatcccatcagaatacaaacggcgacggcccatttaacgatatcgatcattttcgataatctctcctttctccaaaaacttagcgaaggcaatcgtaccgataaatgataaaatgccgagcagcagaatgatgtccaaaaaggccgttgtttttatgagaatggatacaagcgcggtcatggcaatcagattaatgccgatcccatcaagcgcgacgacccggtccggtatcgtaggccctttaatgacgcgaatgacgtacagaagagtcgaaaccgccataatgccgagcgataattgcagaataaacgtaaacatcagcggctcacctcctgaatggctttctcaaaagagacacggatgtcatgaatcgctttctccgcatcttcaatgtccatggcgtgtatatagagaatcgaccgatcatcggagatatccatcacaagcgtacccggtgttaaagtgatcaacagcgagagcagcgtgatctcccaatcctccgtcaattccgtcttaaacgcgaaaatacccgggcggatgttcattttcggagacataatggttttcagcacgctgacattggccagatataattcttttataaagatcagcatcagtttgatgactgaccatattttccaaatataaaacggctgcgagaagaagcgccggaaaaaaaacagcgccgccaagcccgcgataaatccggtaataaatcccgccgtgctgaggctgtttgtgagaaacatccagcaaacagcgagaaacacatttaataatagttgaaaagccatgccatctactccttcaaaacagcttcaatgtatttttccggattcagcagattctcagccgtctgattgacatacggtgaaacccattcggttccgagtccgaacagaagcgacaataggagaaaagcggctgccggataaagaagtccttttgcggaccgtcttgcggtgcccggtatttctttttcttctccccaaaaagcggtcgtaaaaaccttcagcacggagtacagcactagcaggcttgacagcagaatcaatacggaaaacaatgtttcccccttatcgaaaccgccttccgcgatcttcagcttgcctacaaatccgctgaacggcgggatgccggccagagatatggcggagataaagaacatccagcctaaaaccggataacgggtgatcaatccgcccattttgtgcagactggcagtgcctgtcaacgcgataagcgtgcccgccagcataaacagggctcctttaatcagcatatcgtgaatcaagtaatacaccgctccttgaatggaggcaggcgtgttcatggcaatgccgaacaaaatcacgccgacggctgtaataatattgtagatgacgattttcatgacatccgaaaaggcgatagatccgattacgccgaataacaccgtcagcatcgcaagccacatcatcaattggtgggtaaagcctgtatcgtgaataaaaatcagggtgaatactctcaaaatggcatacaggccgactttcgtcaaaagagatccaaataaggctgaaatcgcagccggcggggcgtaataagagcccggcatccaaaaatacagcgggaatatcccgccctttaaaccgaaaacgacgataaacaggacgccgatgacggttatcagcccggtctggcccgattcgcttatttttacgctcagatcagccatattcagcgtgcccgtcaccgcatataagtaaccgacaccgatgacaaaaaacgcggatgacacaatgttaaatacgatatacttcaatgattctcttaattgaattttcgttccgccaagcacgatcagcatgtaagacgcgatcagcagtaactcaaaaaagacgtacatgttgaacagatcacccgtcaaaaacgctccgcttacaccggccagaagaaactgcacccctgaataatagaaagcgcgctcccgtttttctccgatggagcggaaggagtacaaaatgacaagcaatccgatgaccgcggttgtcaaaacaagcagtgcggcgagctgatctgcggcgagcacaatgccgtacggcgctttccagccgccgagcgtcagcgtctgaatcccgtgtgtaaaaaccgtctgaacgagaatggcgctgatgacgatggagacagcggaagcggcggtgctgaatatccgcatcagcataatgtgcctgttcataaaaatcagcagcaccgcggcaagcagcggcaccaggataggcaatatcacaaagttattcatgttgatcatttcccctcattcgatccatatcgtccgatttcagttcctgataggcgcgaaacgccattacgagcaggaaggacgtgacgccgaacgaaataacgatcgccgtcagtatgagtgcctgcggcagcggatcgacaaacaatgtgcttttcccgcccagtatgggaggggcgccttttttcagtccgcccatggtcagaagcagcaaatggacgccgtggcttaaaagcgcggtgccgataatcacgcgcagcagacttttagaaagcagcaggtaggttgccgccataaacaaaataccggctatgacagacattaagatttccactattcttcctctccaatcgtttgaataatggtcatcgtaacgccgacaacaacgagatacacacctaaatcaaacaaagtggccgtcgcaagctccgtattcccaagcaccgggagatgaaaatggccgaatgtatgggtgagaaagggcgccccgaataagaacgaacctgcacccgtcgcaattgcgataagcagacccacggccgctacataaataaaattgacgggcaaaatcgatttgacggtttttaaatcaaaggccaaaagcaaaagcacgatggccgaagacgtaatcagcccgccgacaaatcctccgccgggagcgttatgccccgctaaaaataaatagaaagagaaaagcagaatgataaaagatacaagcttcgtagccgtctgaaggatgatgtcgtttgttttttgctgtctcaacgctcttctccctcctcttttactttcgttctgatcatgctgtaaatgccgagtgcggcaatcgacagcactgtgatttcaaacatcgtatcaaatcccctgaaatcaacgaggatgacgttgacgatattgttgcctcccccgagcttatggctgtaagcggtgaaaaaggaggcgatgctgtcttttgttttttcgctggaagacgcgatcccgagcattgtcacgatgacgccgacgccgagagaaatgataaaattcgtcatccggaatgttcttgtcttctttttccgccgcattttcggcagatgataaaaacaaagaagaaacaaggcgacggatatcgtctcaatgacaagctgtgtgagcgccagatcgggcgctctgaaaatcacgaaaaacagcgcgagcgtgtacccgacaacaccgagtgagataatggccgtcagccgcgatttggcaaacacagtcgccgccgtcgcgctcaccataacgagggagagcacgatttcatacaggccgatttcagccattcctttcgttgtcacggaaaagccgcctttcatcacaaacgccgttccgatgagaatgataaacgccgcaaaagtatacagcagataatcccgcaagaatccggtcatataagatgacgtcagctgataagatcttttttccatattgcccgtcaccgcatcgtaaagccggttcaatgacagttttttcggaaacagtccgtacagccgctcccatttagacagcgtcacgtaaccgattgtgccgacaatgatgatcccgagggtcatcaataactcagccgtcaccccgtgccactgggaaatatggacgtggaatgtatctccgccggttaacagagccggataaatggaattcatcgccggttcaatcaggctgtaggacaaaacgttcggtgcgaaaaacagactgacggcgcaagcggcaagaattaccggcgaaatcagcatgccgagcggagcttcatgcggcgtcttttcaagctgatcaggtttgcgcgcgcctctgaacgttctgaaaaacagcttcatgctgtagataaaagtgaagacactgccgatccatgcgagaacggggaacagcacgccccacgtatcaagattgaaaatatctgcatgagcaatccgcagcatgcttgtaaagaacatttctttacttaaaaagccgttaaaaggagggaggcccgccatggaaaacgttccgatcaatgaaacggtgaacgttaccggcatgagcgccatcagtcctccgagcctgcggatatcccgtgtccccgtttcatggtcgataatgccgaccaccataaataaacttcctttaaaagtagcatggtttattaagtgaaacacagccgcggtcacagccaacgtaaaatactctgaatgctgataatgaagcgcggcggctcctgcaccgagcatagatacaatcataccgagctggctgactgtggaaaaagccagaatcgcttttaaatcggtttgtctgaccgcgttgaaggaagcccataccatcgtgatgagaccgactgaggcaaccgtccaaaaccagacgggtgaaaatgcaaaaatcgggctgaatctggcaatcagataaatacccgctttcaccattgtagccgagtgcagataggcgctgacaggagtcggcgcctccatggcatcaggcagccagatgtaaaacggaaactgcgctgatttcgtaaaggctcccagtaacaggagaatcatcgccggaataaagaacggatggccggcaataatatgcacctggttgaccatttctctgatactgaatgagtctgtcatcagatacagcaggataaagccgccgagcatacacagtccgccgccgacggtaatcaatagtgatttttccgccccgtagcgtgatttctcccgcttataccaatacccgattaataagaaggatgacaggcttgtcagctcccaaaacatataaagcacaatgacattatcgacgagcacaacgccgagcatcgcgcccataaacatcagcaggtacacataaaaggggccgagcttttctttgtccttcgataagtaaaaaatgctgtaaagagtcaccaaagagccgattcccgtaatcaataaagcgaataacagcccgagtccgtcaatataaacggtatagttaatgccgagggacggaatccattcggccgcataccggacggtctctccggccattgtaatagggagcttgctgataaagtaaacaaacagcacaacgggcaatatcagcacaaaccagcctgtatggacccgttttacccgtttatagagaaagggaacgataaatgcaaataaaaaaggcgccaaaatcgcgaaatgtaacagctgcaacaaaagacctcctttgcttgtttttcatcaagcaactgctttatgtaagagtgaaccaatcaattcacggtcataggacccagtacaaattatatcgcacttttttttaccctgctacggcataatgtattcctctctgtatttttgtggtcttttgaacccaaaataaatttatcaaatttcctgatctttgtatatacttttatctttcagatcaagctttaaaaaaggagctggtcagatgaagagaaaggcggcggcctgtattggaatattttgctctattatcgcaggaacattcatagcggacggtttttgcaaaggacggcagcagacggaggcagatgaatgggagagtttttttctcggtgcggaatacgcacacggcaagctgagtgcggctgaatcaatacaaacaccgtttcagccgcgtgagtatataagaatcgtctataaatgaaaagagttccggcaccagggcgcggaactcttttttgtgtgatgatcagcgttttcctttaatgtaagggatgccgttggctttaggcgcatcagcgcggccgatgaagccggcaagcgcgagaatggtcaggatgtaaggggccatcagcatgtatacattcggaatgtctttgaacaggggcaaaagcgagccgataatgcttaaactttgcgcaaatccgaagaacagcgccgctccgagcgcgccgatcggatgccatttgccgaaaacaagagcggcaagagcgataaagccttgcccggaaatggtagagtgcgtgaaatcaagcgcgatcgtggaagcatatacaccgccgccgagcccgccgaacagcccgctgatcatgacgccgatatagcgcatgccaaacacattgattcccatcgtatcggccgccatcgggtgttcgccgacagaacggatacggaggccgaacggcgttttgaataaaataaaccaggaaacaaaggccagtacgatagctaaaatcgacgtataatatacgtcagaaaagaaaatctttcctaaaaccggaatatcgcttaacccggggatgttcgctttgtaaaagggcacgggaattttatcagtctgagcttttccgtaaatcagcttgacgataaacagtgtcgctcctaatgcgagcatattgatcgccacaccggttaccgtctggtcggcacggaaagaaaccgcggcagccgcgtgaatcagcgagaacagcccgcccgcaatcatggcggcagccaaggcaagccacggagcagcggcaccgagctcgcgtccgaaaaataagttgaacatgacgcttgtaaaggcgccgataatcatcagtccttccagaccgatattgacaacccctgatctttcggaaaacacgccgccgagagcggttaaaataagcggagccgcatatacgagtgttgccgggacaataatggataaaatctgcaggaagtccacttacttcgcccccttattcttcaatttatcaaggatgagccggatggcgtagcttgatgccacaaataaaataataatggcgatgacgatgtcaacgacttcagaaggcacgccggattcaatcggcatatttaaggcgccgactttaaggccgccgagaagacatgccgcaagaaccacgccgattgccgtgctgccgccgagaagcgcaaccgcgatgccgtcgaatccgactccggtaaacgcgcctttaaccgccgcatattgaaaggttccgagtccttccatcgcaccggccagccccgcgaatgcaccggaaatcatcatggcgtacatcatattttttctgacgctcattccggcgtattgtgcggcgtgctggttaaatcccacagcccggaattcgaatccgctttttgttttatgaataataaaccacatgaagactgccatgaagagagcgatcagaatgccccagtgaaggcgggagtaatctgtcagctgctctaaaaacggcgagcggagcgacgcgctttcatgaattttgcctgttttgtcccggtgatcggtcatgacatcggaaatgagataattggttaaatgaagagcgatataattcatcatgatcgtgacaatcacttcatggacaaaaaaacgggcttttaaaaatccgggaatcagcccccaaatgcctcccgcggcagcagccgccaataacgcaagcggaaggtggatgtaagcgggggcgtcaaaggaagtaccgacccaaaccgcggcggtccagccgacaaggagctgtccttcaacaccgatattgaacaggccggtccgaaatgcgaacgccacagccaatccggacaaaatataaggcgtaatctgccggatcgtttccccgatgtaatacacctcgccgaaaatgccgttccaaagagccgaatacccgcttgcgacattgtagccgcttgcgagcatgatgactgcgcccgcagccaaaccaaggatgatcgcaatcagcggcacagccagatgagaaagtcgattaatcatgtattttccctgcctccatttgcttacttcccgccattaaaagtccgagctcctgctcgcttgtttcaagcggattgacgtttgcgatgatgctgccttcaaagatgacggcgatgcgatcgctgagattcatgatttcatcaagctcaaaagacaatagcagcaccgctttaccggcgtcacgctgctcaatgagctttttatggacgaattcaatcgcgccgacatcgagtccccgcgtcggctgggccgcaattaaaagatccggatttctgtccacttcccgcccgataatggccttttgctgatttcctcccgacagcgcgcgcgcaggcgtatattcatcaggcgttctgacgtcgtattcttcaatcaggcttcgcgctttgtcataaatcgcgtgtttatttaatatgccgaaagaagagtagggcttttgataataactttgcagcacgatattttctccgatcggaaaatcaaggacgagcccgtgtttatgcctgtcctgcggtatatgcccgattccggcttcagtcattttccgcggcggcatgttttgcaactgtctgccgtttaatgtgatcgtgccggcatgtgtttttctgagacctgtaatcgcctcaattaattcagactggccgtttccgtcaacgcccgcaatgccgacgatttcaccggctctgacagagagggagagctgtttgactgcctcaactccgcgcgcgtctttaaccgttacatcagaaagcgaaagcacttcttgtttcggatcagccggttgtttatccgttttgaatgaaacttcgcgcccgaccataaggcttgccagttcatcttgatccgtctgtgcgacatcgagtgttgtaatgccttttcctttccggatgatggtgacacggtcgcagacttccataatttcttttaatttgtgggtgatgaggataattgattttccttcattgaccaggtttttcataatctgaatcagttcttgaatttcgtgcggggtcagcaccgcggtcggttcatcaaaaatgagaatgtcggcacctctgtagagggtctttaatatttccgcccgctgctgcatgccgacagaaatatcggcaactttggcttcgggatcaatctgcaggccgtaacggccggaaatatcgcgcacgtcccgggcggcgcgctttctgtcaatccggcccaatgttttcggttcttttccgagaataatattttctgagacggtaaaggtatccacaagcataaaatgctggtgcaccattccgatgccgagatcattggctttgttcgggctgttgatgtgaacgcgttcaccccgcacccggatctcgcctttttccggctgatacaggccgaataaaacgttcatgagtgtcgattttcccgcgccgttttcaccgagcagggcgtgtatttcgcctttttttacttgaagcgtgacgtcatcattggcgacgattcccggaaattccttgcgtatattaagcatttcaatgatataatccaccgatttgacgctcctttttagagatgctttgatgaaaaagagcttggcaaaagaaaagctgcaaaagatgcagcttttccttcaccgctcttttcaaaaaagagaggggataagcacgaaagtctccttatcccctgattcttactcagccttgaaggatttcaattctttttcagttgaagggatctcgagtccgtccgcgattttcttcttccaatcgtctgttgctttgatgacatcgtcagaaaggttttccttgtgatccgagatgccgactgcatcttgcgccaaaccgtatgttaatgttttgccgccagggaattttccgtcacttgcttttttcgttaagtccttcacggctgtatccacttttttgaccattgatgtaagtgtgacattgtcttttgtgccttcgacttgaccttcggcgtactggtctttatcaacaccgatgacccatacgttccgcttcggatcttcttttttaagatttttggcttcagtgaagacgcccgttcccgttgcgccggccgcgtgataaatgacgtcaacgcccgatttgtacatgctttcagccgtcgccttgccgacatcggctttgtcaaatccgcccgcatatttcacttcgacgaccgctttcggatttgcggcttgtacaccggcgcggaagccgatttcaaattttttgatcaattcagactccattccgcccacgaatccgacttttcccgttttgctcgataacgcagcggctgctcccacgaggaatgaaccttcctgctctttaaatgtaaggctcgccacgttgtcttttttgacaacggcgtcaataatcgcaaaattcgtgtctttgcgctgatcggcgatttcgctgatggaatcctgcatcaaatacccgactccgtatatcaggtcaaagtgttcccgcgctaatttatttaagttcgttgtataatccgcatctgattttgattgaagatagtcaaaaccgcttttgccttttgtaagccctttgtcttttccgaatgcctggatgccttcccaggcggactggttgaatgatttgtcatcgacgccgccgatatctgtgaccatgccgacggtaaagtttttgcttccggagccgtttgctttgtcacttgaaccgcatgcgcttaatatggttccggcagccgcgatgagcgccatcgccattccgattttgcgttttttcaaagatataacccccctgtaaaatatggctgatgctgttcctttcacactcgattcaccgtcccggatacagaatcgaaaaaactttctgataataatgatgagacgatctctctttttcccgcctaagcggctgtctcttccgggttcgggacttatggcttacctgaaaagatcagctaaccaatcataatttatcattttacccgccataaataaatagaaatttgcttatttttaaaaaatatcaattttacgaacccatttcctcatctggataaattataggaggttccgccgggtcattattcttatatagcattttgtcacgggggatgacagtaaaaaagcaccgttcacggcggaacggcgctttttgacattataaatattgttttatgctgctgacattgccggtgttgatatggtattgaaagaccggtctgccgatcgtgccgtacgccatctctacgttcagcacttgagtatcctccaaaaatttaaggtatttccggatggaaacttgtgagatttcagtatgcttggcgagatcttcagtggtaaaagagctgtctccgaaagattcgatgcttgcccagatgagtttaagcgtgctttttgtcaggcccttcggaaggtgaactttttcagccgcttctttcttttgaaaaagctccgcatccaattctttctgtgtcatgcttctgtgtgattgataaaccttctgcttgcgtctgtagtcggaaagggcggtttgaaaacggtcaaactcaaatggtttgattaaataatcgacggcgccgtaccgaagcgtttttttgatgacatccagctcgcttgcggctgaaatgacgatgacatcgaccgattcattttgtttgcggatttccgttaaaagctcaagcccgttttttcccggcatgtaaatgtcaagaaggatgagatcgatatgatgctcgcttaacacgtgcagcgcgctttgaaaggatgaagcgatccctttcagctgaaagccttcaatctggctgagatagcgtttatttaattcacccaccatggggtcgtcttcaactatgagtacattaatcatcattttcctccttcggttcatacggaatgcgaagactgaaagtcgttccttcattcttttcacttgtcacaatcatgtggccttttaaattttctgttgcctgctgggtaaaatagaggccgaatccccggtttgttcctttcgtggaatacccctgttcaaaaatgcgggtttggtcttcggcagacattccggccccggtgtccgtaatttctatattaagctggcgatcctgaaaccgcatcgaacacgtaatgttttttttcggcatctgcgccaccgcgtcaagcgcgttgtttaacagatttccgataatcgtaatgagctcatggatgacggcaggatccgccgcattcggaatcaggctgccaagctgaatgtctagatcagcgccctgttcgcgtatgtagctttgttttcctaaaagaaaccctgcgagaaccgggcttttgacatcgcttataatttcgcttgtttccgtcttttgctgaatagcgatatctttaatataagtgccgaggtcatcgtattcttttaactgtacaagtcctaaaatgacatggagcttattcatgaattcatgggactgtgctcttaacgcgtttgcatacattttaacaccggacagctgttctgctaaatgtttgacctccgttttgtccctgaaagtggcgattgctccgacggtttgccccttcagatgaatcggaacctcattaaagaccagctctaggccgttaatgcggatatctctgtcctgaagcggttttttcgtttcaatcacctgcttcagccggcttttcggaagaatatcgttcacatcttgatcgaccggattagtcggaatacccattttaataaaaaggcgtttcgcttccgcattggcaagcttaatttttccccgcgcgtcaaccgccaggatgccctccttcgtggattcgagcatggcgctccgctcttccagcagggtggcgatttcataaggctcaagaccgtacatgatgtttttgacggtgcgggcgacaatcacagctcctatgacgccgacaaaaatacttacgcagataatgaaataaagcggtctcaaactgtggcttacgacatcctgtattttgttcagcgaaatcccgactgaaacgacgcccacttgttttttatcttttccatagatcggaacgaaggctctcatggatttcccgagcgttcccgctgatgtgctcgttttgatatggccgtgcatcgccggctgctcgtctccgccggtgaatttcttcccgattttatttgcgtcggggtgggtgaggcggatgctgttcatatccataaccacgacaaattcggttcctgtcgtatgctggacgtccaatgtataatcccggagctctttcagcccttttcttgtttgcaatgcctgtgcgacacccggtgtttctgcgaccagttttgcggtgcgcagcgcggttgtccgttcttcttctttcacgcggtctgcggtctggacgctgatggtgaaaaaagtgatacaaagtgcgatcagaacgacaatacagacgaatatcgttaatcgggtttgcaattttaatgtttttttcataacagccttccttacgtttatcattcccgcgttctactttactccgaaaaagccggtttgtgaagatcgggctcatatttcgtaaaagtgaggaaaaatggaattttttatcttgtcaatgtgttttaagtcctccataataagtgaggtagattacagaaagggacttattatatgaaaaatacttattggacgggttattttccgctcgttgcgattctgctttttagttcgtcattatccatttctacctcgctttatgccatgaagatgcttcagtcgctcggcatgtatcaggggatgctggattatttctccgagaaagggatcagactggcgctttttgcagcgttcgcccttgtgtattttatgcttttttcggctttaaagctgattgcaaacacagtaacagagctgtctcttttgtttttcacaaatgaccctgaaggggacaacctgaaaaaaatcagattaggctctttaatttatgtaggcggaggaattctttcctttgcgcttgtgcagaatggtttctggattgcggcgttatttgccgtcgtcacgctcgtatatttgatcttcatggtgtacagaatctattcaacgctctcgatcgtttccctgatcggttttatattgtttgagattctgttttggtttacttttgttatcggtattttgtacatttttatcaagctttataatagcataatggctagcttacctgtgtaagctagccatttttgttaagacagaaatctgtttttgatctcaggggaggggagcatgcatgcttccctttttccgaaccatttgtaacgtcgccgggcgatgaaagaataggctctgtccctgagggggcggggcactgcgaaaaaaaccgaagacagccgccaggctccgcggagatgacgggcaactttcaataccgcttgggattttctgtatatccgcccgttttcgataaaaatcatgctgtcaaattgttctgtcggaagtccttctgatgccaaaagctcacgggcggtatctgattgcaatgaagcaaatgagatcaggccggccggatcgcgtttaatgatgaattgaacggcgccgttgcataagttgcagacgccgtcaaacaatagtacgcggtccggaagctgagctggtttcaaggtggatcccctccgttatctttaataggctgcttgcagcgtgtttttccagatcgaaagctgagggcttgcgtcatgaagatattcgacgcttgacggtgtatccttgccgacccatacccccattgtatatgcatccgtcaggccgacaaaccacatgtcgtgatagtcatttgacgtacctgattttccgccgacgtatggagctttaaagttcgctttttttcctgttccgcttttaacgacggctttcatcatttctttgatctgcatgttggtccgtacgctgaaaacctgcgtcggctggtctttccattttaatatcgtttttccttttaaatcagtcactttagtaatcgcgtgactcggcgtataaacgccgttgttgccgaacgtggtgtacgcattggtcatttcaagaggcgtcatcccgtttgtaaaaccgcccagcgccgcaggcagacggtaatccgcgctgaccagcttcgcgaaatgaaacggttcaaggtagctgaacgccttattgacgcccacgcggtccataattctgatggccggtgtgttgtacgagtatttaaacgccgtttccagcgttaccgtgccgtacgtgcggttattgtagttttgcgggcagtaatccgcactgcagaatttgcttgcgtcaatcttgctgtttggcgtggcgccggtcttttcaatgtaaggcccgtaatcaagcagcggcttaatggaagaaccgggctgtctgtaagcttgataggcacggttgaaatcatatttatgataatctttcccgccagaaagtgcgataatctgatgcgtctgatgattaatcacggccgctccgccctgaacgcctgcatacggcagattttgattcacttgggcgacgacctgattttgcatatacggattcagcgccgtataaatcttcacaccgtctttcaacagcgtgctgactctttcggaaagctcgctctgaattttttgtttcgcctttccggaagctttttcaagacgtttgtcatagccttcagatgatgaaacaagctgtgtgaattcatcatttacataggaaacatagtcaggatatttgtttgttttttcgtttatatcaagtttgatatgttccttttcggcttttttaagctgttttccggatatgacgcctgctttttttaatccgttaagcaatctgacttgtcgttttttcgtatagtcaaaatgcttgagaggatcatataatgtagggttattagggatggcgcagatgaaagccatttctcccagggtgagagatttcagcggcttgctgaaataaaattgtgccgccgaaccgacaccgtataccccgttattaaaataaatcgtatttaagtagccttctaaaatctcatctttgctgtattttttctcaagctgataggaataggccagctccgtcagttttcggctgaaggtgcgttcatggcttaaatacacgttccttgccagctgctgggtgatggtgctggcgccctggtcaattttatgatctttgaaattggaggcggctgccctgaccatccccataaaatcaaaccctttatgctcataaaaatgacggtcctcagaggtcaaaaacagctgttttacctcattcggtattttattgaagggcacgattacgcggttctcatgatcgctgacaatttcagaaacaaggcttccgtccctgtcatacatgtaactgttttgaaccagattgattgcttttaaatcaatatgtttatcgagcacctgatcaaaaggcttgatttgttttacctctttgccggaagcaataactgtaaatgcaaacaacgggataatgccaagcagcaaaatccatccgattattttacgtaccatggtcactctcttttctcctgatttctagccatatcgtatcattcttttaagaatacgagaaggttaaatttagaagaaatcgtgattgctgatcggtcagcccgcatttgacgctgtatccttttgcagatgtccggccatccataaaagtcccgcgcctgccaaaaagagaaaggcggtgacgtagaaagcagccgaaatggaaaaaccgctcgataccgcgcctccgagcagagggccgagcacatttccgagaaaccgaaagctgacgttatagccgagcacctcaccctgaatgctgcccggcgccctgacgcggatcgctgccgtaatgcagggcagcgtgccgcccatgaccatgccgaacagaaatctgaagactaaaaggatggagagagaggaggcgagcgcctgcggaataaaaaacaccgctgatgcgatcaaaagcacgattaagatccggctgtggccgaagcggtcgccgaagtctccccatttccgggcaagcaataagcttccgagtccggtagctgaaaacgccattccggagaaaaaagctaaattaacaggcccgtgcagctcattgacatataaagcaagcagcggctgaatgctgaaattgccggtttgcacgatcatggtaagcaccatcatcgcccaaagcgcgggctggtgaaaaatataggagagcacctgttttctggaataggttttccgcttgctttgtttctcgccgagcggctgctcgttgacctgaaataaaacgagcagcacggatgcgaaaatgacaaaggacgtaataaaaaacgtgtacgtaaacccgaagctgtcagcgagcagcccgcccagcatcggtccgaataaagtgcctgacacctgacccatctgcaaggtgccgagtgttttcccggcagtttctttcggcgtctgcgccgaaatcatggcaagcgatgtcggaacaaagcctgtcacgaggcccattagcagccgcaggacaaacagctgataaaccgatgtcacaaaccccattaataaaatgcttgcggcaatgccggttcctgtaatcaaaagaatttttttgtagccttgcttatcgccgaatcttccccaaaacggagaaatcacaaacgccattaaaaacgtgacgccgaacacatacccgctccatctctgcacatacccgccggagtgggggctgatcgattcgatatacagcgaaagaaacggaacaatcatggtcatgctggcggaaacaaagaaatttgtaatccaaatgacgacgaagttcttcttacggacagaaataacatcaccttctttacttttcgtgtgtctaataataagtatataggaatgaattcggtatttgtatttttgatgcggatataggaaaattcattatttttagaaaatgaagaaagtttcagaggggaaactgatatactatcataaaatatcatttttgatcggaggaaaggcaggtgtaaaaaaagtggatcagcgcagtctgctcattattgatttcgaatttacgatgcctgacggaaaatacagcccgcaaaatttctttcccgagattattgaagcggggattgtcaaaacggtggatgacgaagtggctgaaacgttttcaagttatatcaaaccgaaaaaatttccgaagctgacgaaacggtgcaaaacctttctgaacatcactcaagaagacgtggacggcggaatcacgtttaatgaattcatccgcaaattaaatgagcttgatcctgataaaaactgcacgatcgtcacctggggcaatatggacatgaaagtgttaaagcaaaattgcatgtttaaccacatcccttttccatttaaaggagaactccgggatctgtcccttgaatacaaaaacttcttcggtgacagaacattgacgggcctgtggaaagcggctgaagagtacggcgataaagggacgggtacgcatcataaagcgctggatgatgcgatgacgactcacaagttattcaagcttgtcgagcgcgataaacaatatcttgaaaaaccgaaacctccgacgatcggcgatcgcgtcgatctgactgaactgtttcgccgggccacataaaaaaacccaatcatgccgactgggtcaaagttctttaaaatagtcacgctctaacacggccaagctggcgagcgatcgtttcgcccattctgagccgtccgctgtgagctgatctttcagccgggcagccgcagcctgtaaggaagccgtataatcaggcacttcaccttcaaacggtttgaccatctggtgcggtatgtttgtctgttccccgtatgcaagcgctcttctttcatgaaaaaacggaacatccgcctgcttcggatgatgaagatctccttgagcgggatgcgtcagaacggctttaatttttactaaatagtgcttaggcctgacgtctgtcacttcccctatgtatgctcctgttttataaaacccttttacgattgtgccgatttcaaatgaatccatagcgttcacctctctgcttattctataaaagatcagcgcgattggctagtgaacagctgccggaagcctgacggaggccgttgtgcccgagtgctcgccgctggtgaaatagacggagccttcatgatgctgaataatcgagaatgtcacagtaagtccgagcccggtgccgttagtcttcagtgtataatacggcttgccgagtttctgaagttcgtcgtcggacatgccgattccgttatccgtaatctgaatgagaatcatctgttcctgtttttgaacggagacctcgattcggccgttttcagaaggcacagcttcaatactgtttttaatcagattaatgaaggcctgtttcagtttttttatgtccccgtacacatataaatccggctcgcttcgaacggtaaccgtcaccgatttaaaattggcgtatgactccattaaggaactcgtttccttcacgagcagagaaatatcaaacctttccttttcataatcatcctgcttcgccatatccagataattcgttatgatcgtctgagcccggtcgagttcggacagcacaagcttctgatacccggagtgtgatttgtcctgaagctgttcgccgctgaacagcagctgcacaaaacctctgacgactgtaagcggattgcggacttcatgggcgacgctcgccgcaagctcactgacgacagccattttttctgagtgtatcagccttgcccgcatggacgcattctcatcaatgatctcaatcaaataaatgcacagcaccagggcgctgacctgaaaaaatacggatattgccgcctcgtaataaatagaagatagattttgaaaattgaaaatattggttacggaatagatgaagacagctgcggttaataggacggcttcagtgcagccgatgagaagagcgaaaagcagtttcttccgctttgaaaaaaaaggccatttcgtttggagccggataggaatgatgattaaaaaaggaattaaggataagaaaaaaagagcggaaggttcaaaccatatgagctgagaaaaaacggatactgctcctgcggcaagtcctgcggcagttccggagtaaagcaggcagacgataatgggaatcagctgcaaaccgtaacggacggtatgaagttcctggatgggaaatgccgtacataataatgaagatgccgctgcaaatacggcgaccagcaggcggttcgctctcggcacaagcaaatcaggcttgctgagccagaagacttgataaagaaaaatagggaatagtataaaagagaagtgaagcaggtaatcctttacaatctccatttatgcgaaatcctttcctatgtaaatatgaatctattataacatctttaccggcaaaaaaagtatattttttctctaaagagaacgcccttatctcttctgataaaggcgttctttcggctgctaagcgagcgcttctttgattctctcgagcccttcttttacggcggcggccgaacagccgacattgagtctcataaatccttcgccgccggggccgtatttcgttcccggctctaaaatgattttcccttttttgagcattctttctctgagctctgcgtccgaaaacccgtattcgctgaaatccatccagatcaaataggaggcgtcaggcttcatcatgcggactttcggcaattcttttcttaaaaagtcctcagccaatttcatatttccctcaatgtaagggatcagcgcgtcgagccaagggccgccctttgtataggcggcttcgattgctgcaaccgcaaatgtgttgaggttggaaatcccgttctgatgcaatgcggcggagaatttcacccgcttataccgatcgggaatgataatggcggatgcctgaatgccggcgatattaaacgtcttgcttggcgcgacacaagtaacagaaatccgcgcaaaatcctcagacagagaagcaaaaggcgtatgcggctttccgtacagcatcaagtcggaatgtatttcgtcagaaacgacggtgacgttatgggcggcgcacagcgatccgagcttcaaaagctcatcccggctccacgctttcccggacggattgtgcggattgcagagaatcatcagcttaacctcagaatcgctcagctttttctcaagatcctcaaaatccatgcagtagattccgttttcttcccgtaatgggttatgtaaaacccgccgtttgttttcctcgatcatctgataaaaaggcgtatacacgggtgactggatcaaaaccggatctcccggttcggtaaaggcctgtacggccatgctgatcgccgtgacaaccccggggctgaacgtgatgcttgcgggatcgggccggtagccgtgccgagtatgaagccatgaagcgacggcttctcttgtattttcgtcaggagacgtataaccgaatatcccgtggtcaaggcgggcttttaaggcttcagtgaccgcttcgggggctcggaaatccatatcggccacccacatcggaagtgcgtccgatacgccgaataacgcttctgccgtgtcccatttcaccgattgtgtgccaagccggttttctcgaaggtcaaagttcatgtatgtcactcctgtagtatcattattttcacagtgtatctatggtaaaatagatttgcaaactttattataagcggtgatgaaaatggaagaaagccaagcggtcatgggaatgatgaaaatcattgccaagtgggacccgtttaaatatggagaagaattttatgagacagaagccgtcgatatcgttcaggccgtctatcgtgaagatcgtgccgacaagctggcagaagccattcaggatatctttgaagcttcatttgaacaaaaacttccgatcgaaggctgccaaaaggtggccgagcagctgctgttcataaaagaaagcagctcctgcaccccttaaaaaccggcgatatcgccggtttttgttattggataaattcaaaaatccgctccgaaacaaactccggacgctcttcggggacgagatgccccgtatctttaagcgaatacaaaatggaatccgggaggtcgcggtgaagccgttctccgactgagaccggcacgacccggtcttcttccccccatattaaaagagcggggttttgtactctcttcaaatcttcagagtccaaatcgccctccctgtgcctgatgaaccttgtcattgctttgaaaatctgccggtctgtaaatggtttttcataaccgtcaatcatttcctggtcgataagcgtccggtcatgtacgacatttagcaggtttttcagcacgccgtcttttgaaagccaatacttaagatacaagtcaaaacaagggatatgcgttccgaatataatcgacggatgcgagcgttttaaataccccgagctgcacagcaggacgattttagaaaaaagctctggtttaagaagagacgcggataaggaaatctggccgcccatcgaatggccgacgagcgcggcccggctgatattgagcttttcaagaagtccgatcagaagcttggcgaggtttgcataagtatatacgaacgtccgtgatttttccgattgtccgaaaggaggcaggtcaacggcgataatatcataatggtttctgagcagcggtatcagttttctgaagctgaatgccgaagataaaaaaccgtgtacgcagacgagtgtgtctctgccgggattttcataatgctcgtaatacagctcaactccgtgtatcgcggcccgtttaatcggtgaaacagcttccataaaaggcttcgccatcctttctttgttgtgatgtaaaggcttttttgattgtcagattttagctccggtttctttcgggtttttcttagcatttgtcgaaaatcgtgatataatgtcatgaagatttttgataatgcaaaggtgtgaaacatatgaagctgaccgaaaaagaaacagaaatattagaaattttagacgaaaacagccgcgttgacgcggaaacgattgcaaaaatggcgaacattcccgccgatgaagtcaaaagcatcattgaaaagcttgaaaaggaaaaagtcatcattgattatgcagctatgattgattggcgcaaagtcgacggtttggaaggcgtcacggcgatgattgacgtaaaagtcactccgaaacgaaatgttggctttgatgaagtcgctgaacggatatacagattccaggaagttgaatcagtatacctgatgtcaggggtgtatgacctatctgtcgttattcgcggcaacacgatgtcagacgttgcgagcttcgtgtctgaaaaactgtccacccttgattccgtcgtttccacgacaacgcactttattctgaaaaaatataagcatgacggcaaagtctttgaaagcggagacgatgacaaaagaatcgtggtgtctccgtaaatggaaacgaagacttcttatttatctgactatgtgcagcagattaaaccgtcaggcatccgcaaattctttgatctggccgctacgatggaaggcgtcatttcactgggagtgggggaacctgactttgtgacggcctggaacgtgagggaagcgagtattctttctttagaacagggctatacggcttatacggcaaatgcgggtctttatgaactgagagaagaaatcagccgctatttagatcagcggttcggcctgaattattcgcctgacagtgaactgattgttacggtaggggcaagccaggcgcttgatctcgctgtccgcgccattatgaatccgggagaggaaatgttaattcccgaaccgtgttttgtcgcctatgaatcactcgtgacactgacgggagcgaagccggtgccgattcagactaccgctgaaaaagggttcaaagcatcagcagccgattttgaagcggctctgacggacaaaacaaaagcgctgcttctttgttcgccgtcaaatccgacaggttccgtctattcaaaagaagagcttgaatcaatcgctgctttcgctgaaaaacacgacatcattgtgctcgccgatgaaatttatgccgaattgacgtatgacgagccattcacgagtatgggggccatccgcggcatgaaggagcggacgattcttatttcagggttctccaaagcatttgccatgacgggatggagactcgggtttacggctgcgcctcccgtgatcagggacgccatgctcaaaattcatcagcacgcgatgatgtgcgcgccttctatggcgcagtacgcggcgcttgaagggctgaaaaacggtcaggaagacgtggaaagaatgaaaaaaagctaccggagacgccgaaatctcattgtggaaacgctgaacgaaatcggactcggctgccaccaccccggcggagcattttacgcctttccttccattcagtcgaccggcatgagttcagaagaattcgcagaacagctgcttcttgaagaaaaagtagccgtcgttccggggaatgtgttcggcccgagcggcgaagggtacatcagatgctcctatgcaacatccattgagcagattcaggaagcgctcgtcagaatcaaacggtttgttgaaaaaagggcataaaaaaagatacgaacccagttcgcatccaaataaaagggggggaatactagaaagccttcgtaaacatagtataccctcctttttccgtgcttaaacatcctcataaaaaaagttctctttgcgaaaaacaaacttgtatgatataattttaaattgcgtataaactgtatttaatttaacttaggagttgttatgaatggcagcaaaatttgaagtgggcagtgtttacactggtaaagtaacaggattacaagcgtatggtgcgtttgttgcattagatgaagaaactcaaggacttgtgcacatttctgaagtcactcacggtttcgtaaaagacatcaatgaacatctttcaatcggtgacgaagtacaagtaaaagtacttgcagttgacgaagaaaaaggtaaaatcagcctttctatccgtgcgactcaagctgcgcctgaaagaaaagaaagcaaaccaagaaaaccaaaagcggctcaagtttctgaagaagcttctgctccgcaaggtttcaacacactgaaagataagcttgaagagtggattgaacagtccaaccgcaaagaccttatcaaaaaataagcatcaaaaaaaagcaccggatatgtatgttcggtgctttttttatgtttatctgacttccggatttgttgcttcctcgcgggatgtttcttcgttcggcttaaacagcaggccgagattgatcagaccggcgatgccgacaaggccgtaaataatccgcgacagagctgatccttggccgccgaagatggctgctactaaatcaaattggaaaaatccgatcagtccccagttaatagcgccgataatcgttaaaacgagacagatacgctgaataacactcatgtaaacaacctcctctatgaattcgtgaaacagttatagattgtgacaaagcaaagaatctatgcatactacattctccgccgtgaaaatcacactgtttcaagctatatctgtgccattcccgaggttacgacgtctgtaaaccgtatgatgtgccgtcaaaaaagcggattgctttacattgaacgtcatctttctgcataatataaatccaaaggaggagatgtcatgcaaaactttacatattggaatccgacgaaattgattttcggaaagggagaggttgaaaaacttcctgaagaaatcaagccgtacggaaaaaacgtgctgctcgtatacggaggcggcagcattaagcgcaacggtctttacgatcaagtaaccgagctgctgaaaaaagcaggagttaccgtacatgaattggcaggcgtagagccgaatccgcgtgtctcaacggtaaacaaaggtgttgcgctctgtaaagaaaacaacatcgatttcttattggccgtcggcggcggaagtgtcattgactgcacgaaagccatcgcggcgggtgctaaatatgatggtgacgcatgggatatcgtcacgaaaaaacaccagccgaaagaagcgctgccgttcggaacagtgctgacgcttgcggcgaccggatcagagatgaactccggatcagtcatcacaaactgggagacacaagagaaatacggatggggaagcccgctcgtttatcctaaattctctattcttgatccggtaaacacatttaccgttccaaaagaccacaccatttatggcatggtcgatatgatgagccacgtatttgaacaatatttccaccacacgtcaaacacgccgtatcaggaccggatgtgtgaatcgcttctgcgcacggtgattgaaacagcgccgaagctgatcaatgatctggagaactacgagcttcgtgagacgattttatatacaggcacaatcgcattgaacggaatgctgtcaatgggcgcaagaggggattgggccacacacaacatcgagcatgcggtgtctgcggtttacgatataccgcacgcgggaggtttggcgattctgttcccgaactggatgagacatgtactcaaagaaaatccggcccgctttaaacagcttgccgtccgtgtctttgatattgccgagacaggcagatcagatgaagagatcgcgcttgaagggatcagcaggctgtctgcgttctggacgagcctcggcgctccgaacagactcgctgattatgacatttctgacgagaagctggatacgattgctgataaagcgatggcaaacggcgcattcggacagttcaaatcactgcaaaaagaagatgtgcttgcgatactgaaagcatcattgtaatcaaataaagggggcggccgaattggcagctcctttttttctgtgttatagtaattcccttacgatttttttggaggttattgtgaatggagaactttacgtactacaatccgacgaaactgattttcggaaaaggtcaaatcgaccaattgaaaaaagagctgaagcaatacgggaaaaatgtactgcttgtatacggaggcggcagcattaagagaaacggcctgtatgaccaagtaacaggcatcttaaaagaagaaggcgcatctgttcatgagcttgcgggcgttgaaccaaacccgcgtctggcaacggtgaataaaggaattgagctgtgcagacagcatgagattgattttcttctcgcagtcggcggcggaagtgtcatcgactgtacaaaagcgattgcggccggagcgaagtatgacggcgacgcatgggacatttacagcaaaaaagtaacagcgcaggacgcgcttccgttcggcacggtgctgacgcttgcggcgactggctctgaaatgaacccggattccgttatcacaaattgggaaacaaatgaaaaattcgtatggggcagcaatgtcactcatccgcgtttctccattttagaccctgagaatacattcagcgtacctgaaaaccaaaccgtatacggcatggtggatatgatgagccacgtatttgaacaatatttccacaatgttgaaaacacgccgcttcaggacagaatgtgctttgcggtacttcagacggtaattgaaacagcgccgaagcttttggaagacctcgggaactataagcaccgcgaaacgattttatacgcgggtacgatcgcattaaacggcacgctgcagatgggctatttcggcgattgggcttcccacacgatggagcacgccgtatcagccgtatatgacatccctcacgcgggaggactcgcgattttgttcccgaactggatgagatacacgcttgatacaaatgtagaccgttttaaaaacctcatgctcaacatgtttgacattgatactgaaggcaaaacggataaagaaattgcgctcgaaggtatcgataaattgtcagcgttctggtcaagcctcggcgcgccgtcccgccttgcggattatgacatcggcgaagacaagcttgaactgatcgcagacatcgccgcaaaagaaatggaacacggcggattcggcaatttccaaaaactgaacaaagatgacgtgcttgcgatactgaaggcgtctctgtaagatcaggtttccggccggagtgattgcgtaaatcccgcagtcacccggccttcttcatgacttgatttagcggtggagttcatataaagtgaaagagaaaacaattcaccgttatggagggacaagcaaatgacgcatgtacgctttgattactcaagagcgttaccatttttcaatgaacatgaacttacatacgcacgtgatttcgtaaaaacggcacaccataatatccatgaaaaaacaggcgccggaagcgactttttaggctgggtggacctccctgaaaactacgataaagaagaattcgcgcgcattaaaaaaagcgctgaaaaaattaaatcagattcagacgtgctcctcgtcgtcggaatcggcggttcatacttaggcgcccgggcggcgattgaagcgctcaatcattctttctataatgtcctgccgaaagataaacgcaaaaaccctcaagttatctttatcggcaacaatatcagctcaacttatatgaaagacgttatggatcttttggaagacgctgatttctctatcaatgtaatttctaaatccggcacgacgacggagcctgcgatcgctttccggattttccgcaaacttctagaagaaaaatacggaaaagaagaagcgaaagcgcggatttacgcgacgacagataaagagcgcggcgctttaaaaacgctttctaatgaagaaggctttgaatcattcgttattcctgatgatgtcggcggacgtttctccgttctgactgcggtgggccttctgccgattgcggtaagcggggctgatatcgatgaaatgatgaagggcgctctggatgcaagcaaagacttttccagctcggaattagaagagaatgcggcttatcaatacgccgtcgtccgcaatgttctgtataataaaggaagaaccattgaaatgctcatcaactacgagcctgcgctgcaatactttgcagaatggtggaagcagctcttcggcgaaagtgaaggaaaagacgagaaaggaatctatccttcttccgctaacttctcaacagaccttcactctctcggacaatacgtgcaggaaggcagacgcgatctgtttgaaactgtattaaacgttgaaaaaccgaagcatgagctgactattgaagaagcggaaaatgatcttgacggcttaaattatttagccggcaaaacggtcgatttcgtcaacaaaaaagcgttccaaggcacgatgcttgcccatacagacggaaaagtgcctaacttaattgtcaacattccggagcttaacgcatatacatttggatatctcgtctatttctttgaaaaagcggtggcgatgagcggttacctgctcggagtcaacccgtttgatcagccgggtgttgaagcctataaggtgaatatgttcgcgcttctcggcaaaccgggatttgaagagaaaaaagcagagcttgaaaaacgccttgaaaaataaaaagaatggctggcccgccgcatgacgggtcagccttttttaaaccgtgaaaggtgtgatgatgaattggcacgactcttatggaagcatgccgtcatttccgtctgttccgccgttattgtctatcctgcgctgaatccttcttccgctgtcctcttacaaaccatcctgtttttcgctcttccactcgggttttttacggatatggtccggctgaaactgaagattggccggatgcattcgctgattacgaagtgctgtctctatgccgccgttttctttatttcacctgaagccgctgcgtccgcaattgtgacgtattttctgattgaatgcgccgttttctcttttcagcgtctgtctgcggctcctgattcttcccggaagccgtatgaagatgccgcagagcggggacgctaaagactaaaaggagcatatttacatgatcagcataccatcttcacttgaagggcaatcttttttattccgcgaattggaacaggtgctgaaaccgatcggttataccatcggaggcggctgggagtatgaccggggattctttgattataaaatttccgatcaggacggctatttatttctccgtatccctgttgaagcaaataaaggacggctggatgaacggggggctgccgttacaatcggcacgccctttttgctgaggcacgtctatcagcaggaaacggatgatacagcaggcggcggtgtttttgaatcattattcaaccaattctccgagccgaaacgccgggatgcagcaattgaccgttcatatatcgatatcggcatttcactcgtgaaagagcttgaagatgttctgctgcattaaagagccaaaaacagatcagtgctgagcacgtggtatgacaagggaggggtaagcatcggcccctcttctttttgtatgccgatgatcgtggtattccgcttgagataatagagcgcacaatcataataagataagccttttcattcctcggggacgggaatgatgcgaacctttttctccagcgtcagatcggacagcgtttgcggtttggcaagctgcagcttgacccggtaatgctcaaacatcacccggctcgacagccgtgatgtgcacagaatcttattggctccggcgcgttcggcgtttttgacataccgttccgttaaaatttctacgatacaatacacggacggatgcagccctttgatggcgagcagcgttaataccgacagcatatcagcttccgcttcattcttctgctggtctgctgtcagaatgacggtatcggcttccgtaatattcgccttattgagcgtgccgtcgtcagcagcgtgtccgcggatgaaatggacgttctcaataagcggcccttctcgtaatgaatcatcgatcaggacgacggtttttgatggtgcgaagtgctgcagctctttcagaagcatatgtgatttctcattccatccgacaagaatgacgtgccccttgcctttaaaggcgacccttccttcgacatagcggtgctgtttgctgaacacggctgaagaaagcgtggcgaaataggcggtcacaaaactcgctccgcttaatacaagcaccatgccggcaatctgcccgagcggcgtctggggcacgtaatcgccgtagccgaccgtagccactgtaataaccgcccaccaaatcccttcaaacacagacgtgaattgcttcggttcaagcatgtaaatcaattgaccgaacaataagatcaaggcgataatgatcaatccgatccgaatatataacggccatctcagccaggaaataaagatacggtttgatttcattcgtccggctcttccttcgacagagaaatggacaaaatctgcttaataatggtatttaatttttcgttcagctgttcctggccgtatgagtcacgcgcctgtctgattaactcggccgtctcatcctcgaactgaatgagaggttcgtcgttttccgattcattatagagctggataaagacgtcaagcccctcattcattctgtctatcgcattgctcagctgttctttttcgccatttgtcactttcatgatggatcacacctgtatcttttttttatacagtatgtcccagttcatttgatgtctttcaaaaatcggcgaaaacatattcacccggtttttttcatatgataaagaaacggaccgaaaaagggtgagtcagatgacagtcattcaaaaagtgctggcggcgctggccggagcgcagctgctcgcttcagcggccgtattgcttattttcgatttgaatggatacaatcatatgtccggcggcttttcatggcttgcttttgcaaaggggaccgttggcacgtttccgttttatactgcaatggccgggtgttttctgatcatgctcgcaggtttgattcctgtcagaaaaaagaagcggatttctgtacaggaaagcggccattcattaaaataatatataagcagttcgtacgatataagagaaaaaggaagaggataatatgctgtttgtctttttaacaattgctgcattgggattgtcgttttgggcacaatttaaagtgaaaagcaattttcagaaatactcagacgtggaagcttccagtcagcggacgggggcggaaacggcaagacggattcttgatataaacggtttatatgatgtgccggtagaaccggtaagaggcactttaacagaccattacgacccgacggaacgggtggtgcgtttatctgagccggtatattacggccgctccatttccgccatttccgtcgcttcccatgaagtcggacatgctttgcagcatcaggaatcatacggcgcgcttgtgctgagacacaaaatttttccggtcgtcaattttgcctccggggtcgcccctctgcttttcttgggcgggatgctcctgggcagcttgaatttaatcggactcggcattattttattctctgccgctgtttttttccagcttgtcacgctgcctgtcgagtttaatgccagcgcgagggcgaagcggattatcgtgtcggaaggattcattcgcaacagtgaagaacacggcgtgaataaagtgctgaacgccgccgcgctgacgtatgtggctgcggcgctcgtttcattattcgagctgcttcgttttgtgatgattttcttaaacggtcgtaatgagaattaacacgaaggaggtggccccttaccgtttgcggtaggggtttttttgcttatattaaaactgattctcattatgctgttaatcggattaacggccatctttgtggcggcggaatttgcgatcgtaaaaatccgcggatcaaaaattgcggaactggttgaaaccggagacagccgggcgcttgcggcgcacagggttatttcaaatctcgatgagtacttatcagcgtgccagctcggcattacgattacggcgctcggactcggctggctcggtgaaccgacgattcagcggattcttcttcctgttttcagcctgatcggaatgccgtcatccattacgcacgtcgtcacgtttattgcggcgtttatcgccgtcacgtatctgcacgtcgtcatcggcgaacttgcaccgaaaacgatatccattcaaaaagccgaagccgtcagtctgtggacggcgaaaccgctcattctcttttataaagtgatgtatccgtttatcaagctgttaaacggctcggccggatttttggtcaaactgttcggctttcattcagtgaaagaacatgaagtcgttgtcagtgaagaggaattgcgggtgattttatccgaaagctataaaaaaggtcaaatcaatcaatctgaattccgttacgtcaacaaaatatttgaattcgataaccgggtcgccagagaaattatggtgccgcgcaccgaaatcgccgccatctcgcttgaccagtcagttgatgaagccattcatttgatcatcaacgagcggtatacgcgatatccggttattaaggaagacaaagaccacattctcggcattattaacaataaggatttatttaaggcgtattttctcggccgttccattgaattaaaagaaattatgcgtccggtcatcagagtgattgaaagcatcccggtccaggaacttttgatccgcatgcagaaggagcggattcatatggcgattctcgttgacgaatacggcggtacggcggggcttgtgaccgtcgaagacatattggaggaaatcgtcggggaaattcgcgatgaatatgaccaggatgaaatgccgcacatcgtcaaaaaaggcgaacaccattatgtgatggacggcaaagcgctgatagaagaggtgaatgacctccttgatatcgccatcgaaaatgaagacattgacacgatcgcgggatggctcttaacacaaaaaatggagctgaaaaacggcgacgtgtttcatgccgaagggtgtgaattcaaggtgctggaagctgaagaccaccatatccgctttgttgaaattaaaaaaactgatttctgagcctcctgctttttgcaatgaggctttttttctgaaaaaaatgcttcttcatcccgctccttcatatgctgtaatgaaaggagtggcggtatgaaaacggattggtggaaaacggcggccgtctatcaaatttatccccgaagctttatggattcgaacggagacggaatcggcgacattaacgggatcagagcaaagcttcattacataaaagagctgggggcggatgtgatctggctttgtcccgtttttgactcgccgggcgcggacaatggctacgatattcggcattataaacaaattgccggcgaattcgggacgatgaaggattttgaccggctcctcgcggatattcatgcgctcggcatgaagctgattatagacctcgtcgtcaaccatacaagtgatgagcatccttggtttatcgaatcccgctcagcgaaggattccgaaaaacgggactggtacatctggagagacggaaaaaacggcaaagagccgaacaattgggaaagtattttcggcggatcggcatgggaatatgatcaagggacaaatcagtattaccttcacctgtttgacaaaaaacagcccgatttaaattgggaaaacgaatcgatgaggcagtctgtttatgaaatgatccgctggtggcttgataaaggcatagacggcttccgggtggatgccatttctcatattaagaaaaaagaaggtctccctgatatgccgaatccggacggtctcccgtatgtcccgtccttcccgtatcatatgaatggggaaggcatcatggatctcctgaaagagctgaagcgggaaacattttcacgctatccgatcatgacggtcggcgaggcgaacggagtgacggctgcggaggcggctgattgggccggtgaagaaaacggcgtctttcatatgatttttcaatttgaacacctcggtctctgggatacggatgagaatcaaagtatctgtattccggcgcttaagcgcgtcttgtccggctggcagaacagtctggaaggtaagggctggaatgcgttatttatggagaatcacgaccagccccgttccgtttcggtatggggtgacgaacggcttttgaaagaaagcgccaaggcactcgcggcgatgtatatgctgatgaaaggcacgccgtttatttaccaggggcaggaactcggcatgaccaatgtttcgttcccatccattgaagattacgacgacgtcgcaagcaaacagctgtatgaaaaagagacgtcccgcggtgttccgcatgaaaaagtgatgaaaatcatctggaaaaagggccgggataattcacggacaccgatgcaatggagcggcgcggcgaacggcgggttttctgatgcttccccgtggctcggggtgaacccgaatcacacatggctgaacgctgcatcgcaaatgcaggatgaaacatccgtataccatttctacaaacggctgatcgccctcagaaaaaaacatgacgtattgatcagcggaacatatgaattgctgcttccggaggaccggcagatttatgcctatgtaagaaaagacggaacggaaaccgccctgatcatcaccaatctgtccaaaacccccgccttatacaggcatcccggttatccgcttgattccgattcgctcgtgctcgcaaacatggaaacaacagcgcatcggcatgtgacatctgttctattaaagccttatgaagcccgcgtatatgtatggtgaaaaacttcagttccgagactgaagttttttgtgatctgcgtttatcatcgcgatccgacaggaaaagacaaatacagaaacgaatatgggaaaggaagagaaaaaaaggaaggggcattcatatgctgaaaaaattgcagattcaaacaaacagacgggatgaaatgatcgacatcacgcatgaagccgaagtatttctccgcgaaacaggcgtaaaaagcggcttggcgctaatatactgtccccataccacagccggcattaccataaatgaaaatgccgatccggatgtgaaaagggatatgctcagaaggtttgatgaagtgtatccgtgggagcatgaactggaccggcatatggagggaaatacggcggcgcatatgaaagcgagtacaacgggcgcctcccagcatgtcatcattgaagacgggcgcctgattctcggaacgtggcagggcatttatttttgcgaatttgacggtccgagaaacagaacatgttatatcaaaatacaggctgaaacgggggaaatcacaatgagtgagtggatggacgcattatcattgacaaagcccgtcatccaggcgccgatggccggagggcttgtcacaccgcgcctggcatcagcggtatcaaatgaaggggcgctcggaagtctcgcttcaggatacgtcagtccgcaggcgcttgaaaaacagcttatcgagatgaaagacctgacgaaccgctcctttcaagtgaatcttttcgtcccggaagaaaggcagatgcctgaggaggaactggttgaaaaatggaaagcgcgcatcccgagggcaaatgacgccaagccgttctccgatttgaaagaagaatggaatgattttgaggaaaaagcggagcttctgatccgttacggggtcaaagcgtgctcattcaccttcggcctgccgccggaaaaaacggcagaaaagctgaagaaaagcggctgtttccttttcggcaccgcgacaacgccggaggaagcgaaggcctttgaagagcggggaatggacgccgttatccttcaaggaatagaagccggcgggcatcgcggatcgtttctgccggttaaaggagaaccggctctcggccttatggcactgattccgcaggctaaagacgcgctgaaaatcccggtcattgcggctggaggcatttttgaccgccgcggggtgcaggcagcccgatgtttgggtgcggacggtgttcaagtgggcacaccgtttctcctttgtgaagaaagcagcgcctcgccggcatatcaaaaagccattgccgaatcaaaaggagccgacacgcggctgaccacattgttttcgggaaaacaggcgcggggaatcgtgaatcagttcatgaaaacatatgaagctgatgaggggaaaacgctgccctatccgctgcataatacgctgacaaagccgatgcgagggcatgcggctcaatcaggagacgcggagcatatgtctttatgggcaggccagtccgccgcaaaacttgaagggccgacagacgtgaaaaccgttttggacgctttgtgctgatcataattacgatgctgtgaggtgatggatgatgaagattcttcaaatgtcctataaaaaaagagggaatattgagtttgtctttgaagattttccgcattccaaagtcaccatggcgccgattaaagggtattactttgtccggaccattaaatggagcagacgggacagagccgtcacccgccatgacttagagaagtttgaatgggcggcaaaccaagcgctcggcacgaccgctttttaccgaaaaagaaaagcatttcacatcccatcgtcaccatgacagacgatgggattgttttaatgcatgatctgataaagcgcgggcgcatcaagccttgtcgcctgagaaagcagataagctgactgcacggcattttttcttcttaaagaattcaatctctggatgatttgttcagcggtcagaatcccgagaccgtgggcaaaatattgatcattccccatcacaatgacattttctccccgccactgggcctttgcgggattaaactcagggtttttaaaatataaacaatctccccgtaaaaagtgtctgccggtttccgtgtagatcggcaggtgctcatagtgccagtcatacaaagtaatatcccggaaacggcggtcaaaccgttcttcaccgatcgtctttaagacggccagataataaatcacaacaatagcggtagcgcattcaaatgcataaaacgccccgttttcaataatatcccgtatcgctttggaagcggggattctgtacttcagctccagagctccttccggcgtcactctccaataagccgtatttccgtatgttttggcgaaagttgcaaattttgcgcctgatccgtgcagttctcttgcagcctccacgatatggcgccgcagccgtgcttcaaacatcagttcagtaattgacccgtaatcgaattgtacgggagaattgatcagttcatttaaatacggaacaaggctttcttccgtctgccagttcgcgatgtcctggggccgaagcacttggccggatatgataatcatctgcacgccccctctctttttttataagatatgcaggaggcttgggcaatgaaaatcaagtcataaaaaagggggaaatgttaacaaaatgtgaaggaggagccgatatataaggtatcacatatgagggagcaagcttaatatgaaaaaattcatcaattggtgtacaaaggcatcgatttcacggaaattaatcatttcatttatcgtgatcttaatcataccgattctcgtgttggaattcagttcataccatacggcgagcaattcgctggatgatcagatttcaggcaacgcgaaaaataacatcgactcttttaactcgaccattacaaatgatatcggcgcaaaagcaaaggcgattgaatttttcagtgaaaccttaaaaggttcatcattctctaaaaaaaataaaaccgaacttgaagaaaagttcgggcaatacacgtctattcataaggacgcagctcgtatttacggaggaacggaagacggcagctacgtacaggcgccgaaggaaaatgttccggccgattacgatccgagaacacgcgcatggtataaagacgctgtgaaggctggcggcacgctcgttgtcactgatccttacatcgctgcaaacgacggcagcatggttgtcaccgtagcaaagcagatgcaggacggaacgggcgtagtggccatggatattacgattgaccagctgctgaagcaaatgcaggaaatcaaaatcgggaaaaaaggcttcgtgtttataacatctaaaaacaagacttacgtcgcgcataaagaccataaaccgggtgataaagtatcaaccccgtggctgaatgaggtatacagcaaagacagcggcattatttcatacaagcttgataatcaagataaaaaaatggcgtttacgacaaataaactaaccggatggaaaatagaggggagtatggaactcaccgaaattaaagacgcctcaaaaccggtgctgacgatgggaatgatcgtgcttgcagcatccattatcatcgggggaattttaattctgctgattgtcagatccattacatcaccgctgaaacggcttgtccgctcgtctaaacaaatcagcggcggagacctgaccgaaaccattgaaatccgctcgaaagatgaattgggcgaactcggtgcaagttttaatgaaatgggagaatctctgcgcggacttataagcgcgatccaaaactctgtcgacaacgttgccgcttcatcggaagagctgaccgcttcagcttcgcagacaagcaaagcgacggagcacattactatggcaattgagcagttttcaaacggaaatgaagaacaaagcgaaaaagtagaatcaagttcagccaagctgaatcatataaatgaagggctcgcagccgtttcccgcacatcatcatccattacggaagcatctaaacaatcgaaagaagctgccggcaccggggaagaatatgtgcagcaaaccgtcgggcagatgaatctcatcaatcaatccgttcagcaggcggaagctgttgtgaaagggcttgaagccaaatcaaaagacatcactcatatactaagagtcattaacggcattgccgatcagacaaacctgcttgcattaaatgcagccattgaagcggcaagagccggtgaatacggacgaggcttctcagtggtcgcggaagaagtgcgtaagctggccgtccaatctgcaggttctgccaaagagatagaaaaactcattcaggaaattacagctgagattaatacatcgcttcacatgtttacatccgttaatgaagaagttcaatcaggacttgccgtgacggaccgcacgaaagaaagcttccagaatatcttcggcatgacaaacgacatcgccgagaagcttcaatcaatgaacggcacggttgaacagctgtcagacagctctcagcacgtctcagccgcagtgaccgatattgcggacgtatcaagagaaagcgcggcaagtattcaggatattgccgcatccgcagaagaacagcttgcatctatggaagaaatcagcacatccgccgatacgttggcgcaaatggccgaagaactgcgggaattaacgaaacaatttaaaatcaactagtacaaaaggacgctttccggatggaaggcgtctttttttatggaggcaggcagagaattaaataaaaagactcaccttaaaagagagtatatagaactatttttcatttatgactaaattttcaatgtaataaaaagggagtccgccgatataaacagtaaatgattgaaagaggtttacaaaattgagaaaaacagcaaaaaacatcgcaaaaaaatcaatagccagaaaactcatcttgtcatttttactgatcttactcattccggtagcagtattggctgccagtgcctaccgttcggcggcttcatccgttgaaaatcaaatgatggaaagcgctgaggggaatgtgcaaatcttaaacaatatgattgatgaccggatcggaacgtttacaaaaagctcagcatatttcagcgaatgggcgacaagcgcaaaatttaaagaaaaaaaccaaacggaaatgaaagaaagattcaagcagtttattgaaagcaatgataaagcggcagccatattttcaagcagcaaggaaggcgcgtttacacgttatccgcatgccgatatgccggccgatttcaatccgcttgaaagaagctggtatcaagaagccatggagaataaaggccagaccatcatcacggacccttatcagtccatctcaaacaaaaagatggtcgtcaccatggcccgtgccgcgcaagacggatcaggcgtcgtcgccattgatattaaaatcgacgatctcatcacgatgacaaaagaagtcaatatcggaaaagaaggatacgcctttatcctcagcaaaaataaaaaagctgttgcctacagtaatgaaaaagccggcgcggcggtatcgggaaaatgggttgatacattatacagcggggaaaaaggcgattttgaatatacgctgaacggaaaagcgaaaaaaatggcttacgtcaccaataaagcgacaggctggaagatcagcggaaccatgtccgttgatgaaattaaggatgcggccagacctgttttgaccatagccgtcatcatattggcgatagcggttgccgcaggaatgattttcatttattttgtcatccgctctattacaaaaccgctgaaacgcctcgtagcttcagcggaaagaatcagcagcggagatctgacggaaaccattgatgtcagttccaaagatgagcttggtgtgctcagtaaaagttttaatcatatgacagattcactccggtcccttattcagggaattcaggactctgttgaacatgtcgcttcttcctcagaagagctgacggcttcggctgagcagacgagcaaagcgacggaacatatcacccttgcgattgaacagttttctaatggaacggaagaccaaagtgacagcattgataaagcgacatcccaagtgaatgacatgaaagacggactcagcgatctggcggaagcagcagccgttgtgacggaaacttcaattgaatcggcggagatatcagtcgccggagagcggcttgtcaagaaaacagccgggcagatgggcaccattgatcactccgtcagtaaagcggaacaagtcgtaaaagggcttgagctcaagtcgcaagacatcaccagcattttgcgcgtcattaatggcattgccgatcaaacgaatcttctcgccttaaatgcggccatagaagcggcaagagcgggagaatacggacacggtttctcagtcgtcgcagaggaagtgagaaagcttgccgtccaatcagccgattcagcgaaagaaatcgaatccttaatccatgaaattgttaaagaaattcatacatcgctcggaatgctggaatccgtcaatcacgaggtgaaaagcggcctgcagctaacggacgaaacggaaaaaagcttccgggacatctccgccaaaaccaatcagattgccggtgaactgcaaaatatgaatgcaactgtggaacagctttctgccgggtctcaggaagtctcaaacgcttcagaggatatcgcggccgtctccagacaaagcgcggcaagcatacaggacattgcggcttcagctgaagagcagcttgcgtctatggaggagatcagttcatccgccgtcacgctcgaaaaaatggctgaagaattgcgcgggctgacaaaacgttttaagataaactcttaattaagtctaaaagactacttttagataggtaaaaagtatgcttcgttatatttcttcttttaggatatgtatatttacctataattgccgatatgaagggtaaacatgcaagaggagatatagcagatgaaaaaaattgtgcaaattatcaagcagagatcgcttacaagaaaactgctcatttcttttttagccattcttattcttcctatttcaacgctggcttttatcgcttatcaatcggcggtaagcacgcttgacaggcagatgatgggaagcgcattagataatgtgcagcagattaatgatatgatcaatacaagcatcagccagaaggaagacggcgcggcatatttcagcgattggctcaccaaggatcggtacaagccgaaaaaccaatcgcaaattacggataaattcagtgagtatataaaaatcaataaagacgtggaatccatctatacgagtgacacggaaggccatttcacccggtatcccgacctgcagatgcctaaaggatataatccgattgaaagagattggtataaaaaagccgtggaaaacaaagggaaagttgttgtaacagatccttaccgcacggcttccaccaatacgatggtcgtgacgatcgtgcagcagacgaaagacggctcgggagtcatcgccatcaatatgaaaatcgaagagcttctgaaaacgacaaaaaaagtgaacatcggaaaatcaggctatgcttttatcctgacgaaagacaaaaaagtggtcgcccacccgaaccgcacatcaggaacagtattaaacggggattgggctgaacagctgtacagcagtaaaaaaggtgattttcaatacacctacgacggtcaggaaaagaaaatggcttatgatacgaacgggctgacaggctggaaaatcagcggaacgatgtatctggacgaaattcatgaagcggcgctgccgatccttcatctgtccctgctcgttctcgtattagcgattgtcatcggaaccatcgtcatggtgctgattatccgttccatcacaaaaccgctcaaacagcttgtaacatcgtcgaaacagatcagtgaaggggatttaactgaaacgatcgagattcaatcaaaggacgaattaggcgagcttggaaaaagtttcaacaatatggccgcctcgctcaggtctctgatccataccattcaggattccgtgaataacgtcgcgtcttcatcagaggagctgacggcttcagcagagcagactagcaaggcaaccgaacatatcacactggcaatcgaacaattttctaacggaaatgaaagccaaagtgaaaaaattgaaagcgcggcggaacatatttatcaaatgaacagcgggcttaaagatatggcgaaagcatctgccgtcattaccgaatcctccgtcacatcagcggaagtcgccaattcaggcgggaagctcgtccaccagacggtcggccaaatgaacgtcattgaccggtcagtgaaagaagctgaacaagtagtgcgcggccttgaaacaaaatcaaaagacattacaaacattctccgtgtcattaacggaattgctgatcagacaaaccttcttgcgctgaatgcggcaattgaagcggcccgtgcgggagaatacggccgaggcttctcagtcgtagccgaagaggtcagaaaacttgcggtgcagtctgcagattcagcgaaagaaatcgaaagcttgattgtagagatcgttaatgaaatcaatacatctctcggcatgttccaatccgtcaacaaagaggtggagagcggacttgatattacgaatcagaccgaaacgagcttcaaacggatttctgaaatgacgaaccagatcgccggagaaattcaaaacatgaacgcgacggtagaacagctgacagccggatcgcagcagatttcaggagcctccgagcaaatcgcgtccatcgcaaaagaaagctccgccagcattcaggatatcgccgcatcggccgaagaacagctggcttcaatggaagaaatcagttcgtcttcggaaacgttatcccaaatggcggaagaattacgtgatatgacgaaacaatttaaaatagaataatagtagaaagacacccaaatgtgctgtttgggtgttttttttagtttttttaataaatcttttgtcctagctgacgataatagatttagctttcaaagaaggagactgaaaaaaatgaaacaactgatacattggatcaaacagccatccatcagcaagccgcttatcgcggcatttttagccgtattggtgcttccggtcggcatactcgcctacttcagctaccaaacggcggggagttcattagaaagcgaactgacccacagcgctcaaggaaatgtcaacgaactcaacagcgtgctggaaaacatgctcgacggcaagctgaaagcaattgactattacagtgaatcaatcacaaaggaaaaaatgaaaacgaaaaataaatccgaactgcttgaaaacatgaagcagtatgtcaccgtaaatgacgatgttgcatcagtgtatgccgcgtctcgcgacaaagcgttcgtgaaatatccgtccgttgacatgccgtccgattacaatccgctcacacgagaatggtatacaaaagcggttgaaaaaaacggacagccggtatttaccgagccctataaagacgctgcaaccggacaaacggtcgttacgattgctcagcagacaaaagacggatcaggcgtagtggcgcttgatataaatctgggagacctgctgaacgcttccgaacgcgtccagatcggtcataaaggatttgcttttattacaacgggagataaaaaatacatcgcccatccgactataaaagcgggaacagaaggctcaggggagtggacaaaagaagtattttcaaaaacaagcggaacgtttgaatacatctttgaaggacagcaaaagaaaatggccttcacgacaaacaaactgacgggctggaaaatcgccggcacattttttgtcagtgagatacatgatgcagccctgcctgttatgagaatggcgctgatcattcttgcggtgtctcttatcgtcggcgggattttaatcttttttatcattcgcgcgatttcaaaaccgctcaaaaaacttgtctcgacatcagctaaaatcagtgacggcgatttaacggaagtcattaacatcagttcgaaaaatgaattcggacagctcagccaaagcttcaatgagatgtcagcatcactccggtctgtcatcggtgtcatccaatcatccgtcgaacatgtcgcttcttcatccgaagagctgacggcatctgccggacagacaagcaaggcgacagagcatatcacactggcgattgaacaattctcaaacggaaacgaatcacaaagcgaaaaattggaagaaagtgcagaccatctttcccaaatgaatgcaggcattgccgagacggcgaatgtatcggcggaaatcactgaatccgccatccaaacctctgatacggccggaagcggagaagaattagtagcgaaaacggtcggccagatgaaaacaattgatcgttccgtacagcaggcggaagcagtcgtaaaagggctggaaacaaaatcgcacgacattaagagcattttgaacgtcattaacggcattgccgatcagacaaacctgcttgccttaaacgcggccatcgaagcggccagagccggcgaatacggccggggcttctccgtcgttgcggaagaagtgagaaagcttgccgtgcaatcagccgactccgccaaggaaatcgaaacgctgattcaggaaatcgtcaaagaaatcgccacatcgctttctgtattccaagcggtgaatcaagatgtgaaggaaggactcgatattacggatcaaacggccgaaagcttcaaaaaaatctcggaaatgacgactcagatttcaggcgctttgcagcacatgaacggaacgcttgagcagctcgcggccgggtcacaaaacgtgacaaacgcggttgaggatattaccgcagtcgccaaagaaggatctgccggcattcaagacatcgccgcgtcagccgaagagcagcttgcctccatggaagaaatcagttcatcagccgaaacacttgcccatatggcggaagaattgcagcaggttacgcggaaatttacgattcagtctgaagacgaagagcagctgtaacgagctgtttcttttccttcgctgaaaaaagcgatacacttacataaaagaagggagtggcagtgatgagattagaaggcaagaaagtcatagcgcttgtcagtgacgactttgaagacttagagctttggtacccggtctaccggctgcgggaggagggcgcgatcgttcatttaataggagaagaagccggccgttcatacaaaggaaaatacggcgtgcccgcgacagcggattacgattttaagagcctgattatccaggagtatgatgctgtgctcgtgcctggcggctgggctcctgacaaactgagaagatatccggaagttttggacatcatccgtacgatgaatgagcagaaaaagccgatcggccagatctgccacgcgggctgggtgctcatatcggccggaattctcgcagggaaaaaagtaacgagtacgcccggcatcaaagatgacatgacaaacgcgggggcacagtggctggatgaagctgtcgtaactgacggccacattgtatcaagccgccgtccgcctgaccttccgcattatgcaaaagcgttcgctgatctcttagcatccaaataaaaaacctccgcccgaagccgggcggaggtttttagttttgatcggcagggaagacaattccgatttgttttcttgcttcttccataatgcttgccgtaatgaaagaacgctcaaaggtattttcggaagactcctgctgtccgtttcgaagaagattgatgaattctgccgtttcgtaatacatcggcggtttcgaatcagggacggaaatgtcctccgtgcgtccgtcacgatagcggatttccgcccgttccggcccgtgaatgctgtccagtacgattgtgccgtcttcaccctgtatttccgccggggcaaacgaatttgagatttttgaatgcatcagcaccgcttcaaatccgtcatatgacagaataaccgtgccttcgccgtcaacgccggatgataatttgtgaccggtcgcaatgacgtctttcggtttgccgaacaggacgacggccggataaatacagtacacgccgatgtccattaacgatccgttcgatagttcaggtttaaacgcgttaagcaccgttccgtttttatatgcatcatatcgtgatgaatattggcagtagcttgccgtgaatcttctgatgggcccgattttatgtaagtggttttgaagcatgctgaagttcggcaggaacgtcgttttcatggcttccatcaaaagaacgccgttcgctttagctgcgtgaatcatgtcttccgtttcccttgcgttagacgcaaacggtttttcgcacagcacatgcttgccgtgttccataaaaaggatcgcctgttctttatgaaatgcattcgggctggcgagatacaccgcgtcataagcttcgctttctgccatttcttttaggctggtgaaataatgagcagcgccgtgtttgccggcaaactccgccgcacgttcctcagttctggaataaaccgccgttaattgaaaatcatcaatagcagaagccgcctccagaaatcgttctgtaatccaattcgttccgactgttgcaaatcgaatcattgctatcgctccttctatgtattggcttacattatagctgtttttcacagaaacataaatgaaaaaagactgcccggcaaagatataggaaaaattcccatagaggccggttattatttttcattacaggaacgatagtgtacaatttaggtaaaatacatatgatggaggaacaatagtggaaacattgcaaacatggggcggcagatttaaacagtttttcttggacaataaatttgtcttgtttttgcttgtattgctgctcatcggtctcaatatccttgtctttacgaagacatcatttattttcacacccattatcgtcctgctcaaaacaattgcgctccccgtcattttgacaggaattgtttattatctgctcaatccgatcgtagatatattggaaaaattaagagtgaaaagagtgtattccatcctgctcctttacctcattataataggtctgatttcgattacgatcgtttcaattattccgtttttaaaggaacagattatgagcctgatcgacaacctgccgaaatatgtggatattgttgaagatcagacgaaaagcctgatcggaagcgattttgtaaatcaggcgcaaaagacgatgaatatcaacatttccgatcttgcaaataaagtatcggcgcaggcggcgacaattgcaaacagcacatttaccggggtcgggaattttatcggcgcgctgacggaagtgatcatttcaattgtgactgttccgtttattctgttctatttgctgaaagacggcaaaaaactgccgttttatatattaaagtttgtgcctacccgtctgaaagaacaaacgtatacgatgctgagcgaaatgaaccacagattaagctcttatatcagagggcagatcatcgtcagcttctgcatcggatttttattatttatcggctatctgattatcggacttgattatgcatccctgcttgcggtcattgccgcttgtacgagcgttgttccgtatttagggccgaccattgccatcacgccggcgattattatcgctttggtcacgtcgccccttatgctgctgaagcttgcgattgtctggaccgttgtccagctcgtggaaggaaaattaatctctccgcagatcatggggaaaaatcttcacattcacccgattaccatcatctttgttcttttaaccgccggaaagctgttcggggttgtcggcattattttagccatcccggggtatgcggtcatcaaagtggtcacaacccatctgtttgattggttcaaaatgcgctcgcatttatatgaagaagaaaaaaatgatgctgtatcgaagtcataaaatcggaacggacatgatatttattataagacaggctttcctttaaaggagagcttctcttttgtaaatgacgaatgaagggaagaataggatgacactatgggagatgttcacagcagccgttttgggaatcgtggaagggctgacggaatacgcgccggtttcttccacgggacatatgatcatagcggatgacatctggctgaaatccggaagcctgatgaatccggaagccgccaattccttcaaagtggtgatccagctcggttcgatcttagcggtggctattgtatttaaggatcggatattaaatttactcggcctcaaaaaaaacgtgacgcgcgatcagcagaagggatacaggctgaccatcgcgcaaattgctgtcggtcttgttccggcggcggttctcggctttttatttgaggatttcattgaccgctacttattttccgtcagaacggtcgcttacggattaattgccggagccgtgcttatgctgattgcagactggatcaataaaaggaaagaaacgatcgatacagtagacagaattacctacaaacaggctttctgtgtcgggttattccaatgtctcgccttgtggcccggcttttcccgctcaggctcaacgattgccggaggtgtcattctcggcttgaatcaccgggcagccgcagacttcacatttattatggctattccgattatggcgggcgcaagccttctgaagctggtgaaatactggagcagtctttctcctgacatgattccgttttttcttgtcggttttatctgcgcctttgtcgttgctctcttagtcgtcaaattctttcttcggcttattaatcggattaagcttgtcccgttcgccatttaccgtgttatcctcggcattattttaatcatgttggtccgataaccgaagaggcccctcgagggtctttttttatgtttgaaaaacatctcataaaaatgtaggcaaactgaatttccggcttgaaatttaaagaaaactcgtctataataaaacatgacgttaccgcacggggccatagctcagctgggagagcgctacgctggcagcgtagaggtcaggggttcgagcccccttggctccatacctttaaacccttattttataagggtttttttatttgtctggaacacagcagagccaataacccaaaaaagtagttggggacaatttggggacgaaaatttatatcgacaaaaaagattatgaccataaactcaaagcaagagtcgaaaccccccatgctattatgccaaacattacagagaacctaagacaagcctcaaattttgtaagccctcgctctctttttgctttacctaatttccaataaacagcatagccggaaaacaccaaaatgattactccaagtcgtgtcatattctctaaaaattctataccatccattgattttcacctcgtttatttatgagaaaaaaataaagtagacttgtagagagtctacttataaacgcctaaccaaagtacacattttcttagagctcaaaacatttgagtgataaagtaagactcattttaaaatgtcacatccttatcccctccctatttatattccccatacattagttttattatcgcaaacagaatggttatttcaaacagttatgtaataataggtaacctataacttgtctaatggtataagaaacgagtttttctttatccaacaaaactatgatcatattcacggtaaaccgaaacaaattgcggttttttttcgtttaaacataatttggaaatgttagaatattatataaaaggaggagtggccttgtgagtcctgttttaccatcatcggaggttggcgttaagattaatgaatggtacaaaatgatacgtcagttcagtgttccggatgcggagattttgaaagcggaagtggaacaagagataaacgagatggaagaagacgagtatttactaatatattattctctcatgaaattccgccatcaactcatgcttgattatttagagccggtaactgtcagagtccgaccgacaatcgacgagttgctggaaaaaatcgaagcatcaaataaaggcatttccggcctgctgtgctattattctttattttttcgcggcatgtatgaatttgatcagaagcagtatgtaaaggcgatcggcttttatagagaggctgaaaaacaactcattcatgtgcatgatgaaattgagagagcggagtttcattttaaactggctgaagcatattacggtatgaaacaaagccacgtctccatgcatcacgtaaagcaagcgctcgatatttacgatcagtatgagttgtataaagtccggaaaattcaatgtctgttcgtcatatctgggaattatgttgactttaaacgttatgaaaaaagtttgccgcatttagaaaaagctttagagttgtcgaaacaagtaaacaataatgaaaggctgctcagttctgcttattacaacataggaaagaattacggagacttagaagaatacagtaaagctgaaatctacttaaaaaaagcagcggagatttctgaaaagtataaattgggcaaccttccgcattccttgtttacatacgcaaagcttctatttaaacaagggaaaacaagcgaggcgattcaaatcagcaaaaaaggactttcatcagctatatatcaaggggataagctgtttgaatctctgcaaaaatatttggaggctttatacattaacgcaatagaccaaatgggaatcaaaaaaacaattgattaccttgagaaaaataaaaactattcgtatgtagaagatattgctcttgatacggctgctgtttatgcagagtcaaagcaatatgacaaatcatatatttatcatcaaaaaatgattcaaacgcaaaaacaaattcagaggggagaatgcctgtatgaattttagaaaaggcgtatttatcattgtgtcggctgttgttttaatgtcaggggtcggtctaacggcatcggctgtttcatttgatggatcatatcaagtttcatctgatcgtaatcaaacctaagaaggagagtgcctgtatgaattttaaaaagagcgtcttcgtcgtcctgggtctgtcattgactttagtatgtgggttgggtatgaactcagtagaaaaacaagcacaagatacgatccaagtagcttctgatcgccttcaaacatgaatatattaggccttttcttcggaaaaggctttttttcatttgaaaacagatcaagcaagataacgtcttcgatttttccgcttttcaaataatcgccttagggcatgggagagttcgttagattgaccatccggcacgcgcgcgctgctttgcgcaagcagggggtgtgcttcgaaaaaactgtcatgattatatcctttcataatgaattcagactaaatgttaccacggaggaaagtgtaatccggtataatagtgtgaggttggaaggaaaaaagaattatttagtctgtgtctttattctttttttgcgggttttaaggaaggggggagaatgaaaagcaacagaagctgatttaaggtcttcaaccctctgcagcagcctctatatacttctccattacgaaataaaggaatcagagaaaaatgaaaaagaaaatccatcttatattatctctttcagcagtgctggcgcttttttttctaacggcgcttccggttctttctcctgtcgtcttcacgtctgcttcagaaaaaggagcaatcaggcatgaaatttataaaaaaggatatccgtatcaaagttactttgcgattcttcataaagaagaagacgacaatgaggcggggaatctttattatgtaaattggttcgattggaaagatgaaaccgggcagacgccgcaattatgttattcgaaaaaattacccgaaggtatgtacaaagtaagctgcggaaccggaccgtaatgatcaaaagcccttctctaatgagaagggcttttttgtcaaagagggatgcgccccccttaatatctccaatataacggctgaggataatatcgatacggatcgttcggataatgcgtatttggctgataaggcttattcatatcgtaaatatccgtgttttcagattgcccgcagtattgatccggacctatcacagttgatttgcggatcggtgaaacggctttttcccattcatgctcattcagacagtacgtatgcgccataatctcaggcggcgtcagacggagaatatccgagccgtaaatcacttcaggcgtatgggcgtcaaatatggctaaaagatgggttttgtctgaagtggcgatctcataatgccaccacccctgcggaacattcgccacttgtccgggggtaatcgggtaattttgtattttctgggtgaacgattcagcatcgacaccgttgcggaacccgaaatacagtacaccaattcagcggcgttttgatgggtatgcggttcaatcacatttgtcttgctcagaaagatatctaataatgaaatattttcaagcgtgtttaactgtttaatccccaatacattgataaagttccgatgatctttagtaaaaaaacggctctcattcacatcgtaagtgaactgtgtattaggagacgtgtaatccatataagaaaccatgcgatcccctgctttcatcttaaaacgtatatttccaagtatatgtatccctgtttcagcgggtgaagaaaaggaaccagaacccataaattccaaatttaacacaatattgtgacggcttttttaaagattcattttagatatatctttttttcgaaatatctcttactataaagatatattaaaaatacatctttagaagggttgaggattaacatgctggatgagagaacgatagacatcatcaaaagcacagtacccgtattaaaaacacatggagaaaacatcaccggacgcttttataacctgatgtttcaagatcatcccgaactgttaaatatgtttaaccaaactaaccaaaagaaacagactcagcgcgcggcattggcaaatgcagtcattgcggctgcggcgaatattgatcaattagagcaaatcattccggcggtcagacagatcggccataaacatacaagcatcggggtaaagccggaacattatccgattgtcggaaaatatctgcttctggcgattaaggatgtgctgcaggatgccgcaactcctgatattatgcaggcgtgggaaaaagcgtacggcgtaattgcggaggctttcatcggcattgaaaaggatatgtaccatgaggccggatggcagggatataaagaatttacggttataaagaaaacgaaagaaagcaaagacattacatcattttatattaaaccgagtgacggttcttcgcttcctgaatatgaagcgggacaatatatcagcattaaagtgcgcattgcggattcttcttatacgcacattcgccaatacagcctgtctgatgcttcccaaaaaggcgaatatcggatttctgtgaaaaaggacggagcggtttcttctcatctccacaatgaagttcaagaaggagataaacttgaagtgagcgcacccgccggagatttcaagctgtcttccgccaaaaaaccggctgtccttctcagtgccggttccggaatcacgccgatgatgagcatgctgaaaacagccgccgaaaaacagccggagcgttccattacttttattcatgcggcgaaaaacggagagtacgccgcgttccgtgaagaggctgagcaagctgcggcgaacaatccgaatagtaacgtcatgtatgtatacagtgagccgtcagaacaagaccgctcagtagacaagcctttttacagcggccggattgatcaaagcttcttagaacagcttcacctgaatcaagatactgaattttacttatgcggctcagcctcgtttatgacgcagatgaaagacatgattcttgcgctcgggtttgactctgattccgttcaatatgaattgttcggccctcagctgagcatggcttaataaaaagactcctctttgggggtcttttttatttgcacaatgtgttctttctccgtctttttccctattttattgaaattttcatcaatgaacagtaaaattataaatctagtgattccggaattaaaggaaggttgatatgaaaaagaaagctaagaccaaaagggtgctggggtgcctttttgctgtatctcttatattcggattatttttgatatctatggtgttttcgaaattcatagtgacggaagaaaaaccgccagaagaagtggacgggcagcaggtctttattgacagcctttccgggcatgctcagattttatatgagaaatatcatgtccttccgagcatcaccctcgcacaggccattctcgaatcggattgggggaacagtgagcttgcggggaaagcgcgcaatctgttcggtgtaaaaggtgattataaaggaaaacacgtcacgatgaaaacggatgaatttgaaaagggaaaacggaaaacgattcgggcaaaattccgtaaatacaacacgttctttgaatccatggatgaccacgccaaactatttgttaacggaacgtcttggaataaaaagaagtataaacccgtcatagaagcggacgattataaaactgcggcggctgcccttcaaaaatccggctacgccacagatcccgactatgcggaaaaacttaaagatgtcatagaaacatataagttgaatgaatttgacaaaatcaatgcctctcttaaagcagttgatatgaaaggcgccatcaaagaccacgccattgaagacgtatggtccaagccgtcgaaagagcagcattctattaaactggcatcggcgcaaaagtttaccggccagcatattaaagtcgtatccgaaaagcaaaacggagaatccgtctggtatcaatttcaggtgaaagacgagctgatcggctgggttgaccaaacggccgtccagttaaatgaagaaacataaaaagccggcggccgccggcttttttacattccttcagtttcaaatcttttaatatcacgtttatgtcccatcagcacaaggcagtcacattcgcggatgacagtctccggagaaggggtcagctgaatgtctccattatgtttcacggcaagaatggtgcagccgaacctggcccggacgccgagctccagaatggattttaaatgcagctttttcgtggctgaaagctccacgatgctgtattcatctgacaaatcaatataatttaagacgttttcatccgaaaggcttagcgcaatcttcacacccatatccttttccggatggataatacgatcagcgccgattttttcaagtactttgtgatgataataattttgcgctttcacccaaatattagggatgttcagttccttcaataacagcgtcgtcagcgtgcttgcctgaatgttggcgccgattgccacgatgacatattcaaaatttctgattccgagcgaatgaagctcgctttcttctgtcgcattcgcccgcacggcatgcgtggcataagaggagtatgcgttgacccgctcttcgctgatatcgatggccagcacctcatgccccattttaaaaagctctttgcagatgcttccgccgaaacggccgagcccgatgacggcaaattgtttatttttgattcttcccaatcctcataactccttaagaaactgttttcgtcactccaaatacaacaaacaagaatgtactcctgtttcaaaggtttgtcaatgtgagagccggaagaaagaaaacagcacaaaaaaaagaccggctgacaagcgatgggcttgtgccggtccgtttccgcaattatttgcagttgcaaggctgtgtcggcggtgtgctgcgtttttgaacaacaattgtgtcctcagcatagaatttagagccgatgcttaatgatttattttctgcgcggaacttatatgtacctgcagcaggcagcgttttattattaagagaaagcttaaattccgccgcgccgattaaatcaatgtttaacggaagtctgactgttttgccgttattcagaatctgtctttcacgcaaagcgtgtccgtttactgtatcttttgttgtagccgtaaatccgcttggaagggtaaattccataacgcctaagctcagaatcgtgttcgggcggtacgtcaattcgatatcagaaaatgaccattcctgctggctggcacctgtatattttgcaaataatgtagcagtcgcctttgtggacatttccggctcgtgaacggttgaacttgactcagcggcgaatgacgctgtcggcagagaaagaagtaaaaccaagccgaataaacttgccatgacagttgagaaaaacttgtgtttcattttcataaatccccctaaaaaaaatttgttgattgttcttaaaaaagaacgatcatacctataaaaatttaccatcaattttaatggaagtaaatggggttatcttcctatgttttcctgaaaataatcaaatcacgtcgaaaaatgacgaagaaaaaacgcctggttacgattcaggcgttttttcttccgtctctatcggaataaatttaaaaatctctccgctctgcaccgattcggcaagccgcttcagccaatgataataggcctttgagctttcaagctgatcgtataaccggcgtgcttcttcctgtaattccgtgctgccttcctctgccagcaaaacagcctgcaaatccgcctgggcctgtacgatggcggacagatttacctgaacttcccgatcccattttggcgggaagaaattcgtgaaaaacgtaaagaaatccttttccgctacaaacgtatgcttccgtgtgccgcggtgaaaggtttttttgaccacatttaaatcctgcagttttttgacgccggtgctcatactcggtttgctcatctgcagttcctcacgcatttcgtcaagcgtcatttcatctctcatatacatcgttccgtataaaatcccgacactccgggtgattccgtaaagatccatcgtctcggcaatggaatcaatgacaagatcccttgcttgttctatagctgcgaattctggattttcatccatactgtccctcttttcctcttgaagattaaatttgttaagtcatttctttatgtttttaatcttaacgaatcatgacaaaatgtcaaaacctaaacggacaagcccggttttgacaggtcaaaaaacatgtgttaaattaacattgttaaaaacattaaatttttatttaacaaacttacttttcggtaaggaggactctcatgagcaaaacgctttatatcggcggtgaatggatcagtgcagaaaaaaagcagacccgccgtatcatcaatccatttaatcaagaagaaattgcaacggtatgtgaaggagaccgggacgatgcggtgaaagccatcgccgcagccagaaaagcatttgatgaaggggagtggccggtgctttccgggctggaacgcggccagtttgttctgaaaattgcggaattaatcagacgtgatctgaacgaattagctgagctggaatcgcttgatacaggaaaaacaatcgaagaaagcaaagctgatatggatgatatcgcaaatgtatttcagtattatgccggtttggcggataaagacgggggcgaggtcatctcatctccgattcctgattccgtaagtaaaatcgtcagagagcccatcggcgtgtgcggacaaattacgccgtggaactatccgctccttcaggcgagctggaaaatcgctcctgctcttgcggccggtaatacgatcgttttaaagccgagcgagattactccgctgacaaccattaaagtctttcaattaatagaagaagccggtattccaaagggagccgccaatcttgtgcttggaccgggcgcctctgtcggtgacgagctggcgagaaacctagacgtcgatttggtgtcctttacgggcggaattgaaacaggcaaaaaaattatgcaggcggcaagcggcaacgtgaaaaagattgctctggagcttggcggcaagaatccgaatatcgtgttccaagacgctgatcttgaaacagctgcagatcaagcgctgaacgccgtgtttttccatgccggccaagtttgttcggcaggctcccggcttttagtggatgaagcgattcatgatgaatttttagccgagctgatcaagcgtacgaaacgcatcaaattaggaaacggttttcatgaagatacggaaagcggtccgctgatttccgccgagcatcgggccaaagttgaaaaatacgtagaaatcggaatcgaagaaggggcaaagctggaaacaggcggcaaacgtcctgatgatcccgcccttcagaacggtttcttctatgaacctactattttttcaaactgcaagtctgatatgcggattgtccaagaggagatcttcggtcccgttttaacagtcgagtcattttcttctgaagaagaggtgatcagactggccaacgataccatttacgggctggccggggcggtatggtcaaaggatattgaaaaatgcgaacgagtagctcaaaaactgcggatgggaacggtatggatcaatgatttccacccgtatttcgcgcaagcgccgtggggcgggtacaaacaatcgggcttcggccgcgaactcggcaaaatcggcctggaagaatacacggaagtcaaacatatttaccgcaacacaaaacctgcagcggttaactggtttaaagcataataaggaggagatacaatatgacattaaatatgaaagtagaaagcatgcataaattccatacatttgaaatcccgacagttattaaacacggaatcggcgcgattcagcacgcgggaaaagaagtcagagcgcttggcgtcacaaaagcgctgctcgtaacagaccccggaatttataacgcgggggtggcaaacccggtcattgaatccttgcaggaagcgggcattgaagtcgtcctgtttaacaaagtggagccgaatccgcctgtacgacttgtgaacgaaggatctgaactgtataaaaaagaaaactgcaacggtcttgtggctgtcggcggcggaagctcgatggatacggcgaaagcgatcggagtagaagcgacacacgaaggaagcgtgcttgattatgaagccgcggaaggcaaaaaaccgctggaaaaccgtattcctccgctgacaacgattccgacgactgccggaacaggttcagaggttacgcaatgggcggtcattacagacgaggaaagagaatttaaattcaatacgggcggaccgctaatcgccgcgcatttaacggtcattgaccctgagcttcacacatctatgcctccgcatgtgacggccatgacaggtattgatgccctcgcgcatgccatcgagtgctatacgatgaaattcgcgcagccgatcactgatgccgtggctttaatggccattgaatatgcggcgcattatattaagcgcgcgtttgcggacggagaagatttggaggcgagatacggcatggcgcaggcggcgatgcttgccggactttcatacggcagtgaatcagcaggcgcggcgcatgcaatgagccagacgctcggcggcatcatccctgtcgctcacggacaatgtgtcgctgctatgatgggaccggtaatggaatacaactggaaaggatatccggataaattcgcccgcatcgcccaagcattcggaatcgatacaagcaaaatgacaaccgaagaagcggccaaagcgtctgttaattggatgtatgacctcgtaaaagatttagaggttccgagcttagaagaacaaggcgtatctccggacatgattgagcgtttatcaaaagaagcgatgaaagatccgcaaacattcggaaacccaagagatttgaatgagaaagcatacaactggatttacaaacgctgctttgacttaacaccgaaaacagtataataaatgaatcccgctcctttacagagcggggttttttaaggataatgtcaagaaaaaggcggtgatggctgtgtggaagcgcataacagcaaagacggaaggcgtatatatagcggatacggaacaatttgttaccaaaaagatggacaagcttcgggcggaatacggcgggtttcccggtgacctgcatttcggactgacgaaaaaagccggcgcgcgtgagcccatgtatcaaagaggaacggaaatttttaaccggagacaaatttcaatcgtgtccatggaggaatgtgatgacattgcggaggccatggggatttctcatatctttcccgaatggcttggcgcgaatatcgcaatcagcggtttttctgcactaacgtcgcttaaagaaggaaacagaatcatatttccaagcggtgcgtctctgttgtgcgagggagaaaatgacccgtgcattcagcccggagaagtcattcaatccttttatccggatcagccaaaactcgctgcggcgtttgtaaggcacgcgataggcagaagagggattgtctgtattgttgaacggccgggggacatatgcacgggtgatccggtcgacattcattcttatgaaccgaaacgcgtcaagaaaaaaatcgagaaggtctgactcagaccttctcgattttttgtttgatttcttctatttgattgatgtgacgcatttcatgatgaccgataaaatcaatccactggcggatcgtcagttcttgaaaaacgggatgcggaagcacacgtttaaagtcttcctcgtttaatgatgaaataacggcggtcagctgctgtcttgccgtatctaattcttgttttgcttcaatgactgatattcggttttgctcaggttcgaggtgtgacggagccggccgtttatttgttctgtcctcgataaactccatcggtttttcttcaatttcttttaacggtgcgtcttttgcatgcttcgataaaagagtctgtgctgtttcgtcaattttctttaaatggtcaaggacttcccggatgctccactcatcagctgcgggcttttggttgaattcctcatcagagagtcctttcagttcttcccaggtctgctgtctggcttcattaaaaatactcatcctatctcctcctctggagtaaacatatcatatcggccttggataatcatgtaatcagcctctattgttagaaaattgaaaccattctcctttccgcccgtatataaagtaacactccgacatccgggccgaaaggaggatagtatatggacatatttcatctgccgcttgaaacgatctatctttacacactgattattgcggggagcctcacgcttttgattctgttttttcaagatgtttttcacggcctctcggaagccattccagttacatttttaaatccaacattgatattgtcgtttttgacaatcttttcagcctcaggttacatcggcgaaatcgccgctccgctttcaagtcctgtcattgcattactttcatttgctctttcagttcttttggtcagcctgcttcacttcttcgtccttgtgccgctttcatcagcggaagaatcgctcgtttatcgggagacggatttaaagggcagagtcggcagggtcattacttccgttccgaaaggcggctatggagaagtgataatagaaggaatcgggggcgccatttctaaatctgcggtcagctttgatcaagaacagatcaagtacggaacggccgtattagtcattgacgtgaaagacggagtgctttttgtgacgccgcatgaaccaatctgatttctaaggaggaactaatatgactatgccgattatcatcgtcatcggaatcgtattctttttacttatcgcacttattgctgtatttatcacgaagtaccggacggcggggccggacgaagccctcatcgtgaccgggagttatttgggaagtaagaatgtccacattgatgaaggcggaaatcgcctgaaaatcgtccggggcggaggaacgttcgtgctgccggtattccagcaggcagaacctctcagcttactgtcaagcaaactagatgtctctacacccgaggtttatacagaacaaggtgtgccggtaatggcagacggcaccgccattataaaaatcggcggctccatcggtgaaatcgcaacagccgctgaacaatttttaggaaaatctaaagaagaccgtgaacaggaggcgcgggaggtgcttgaaggccatctgcgttcaatcctcggctctatgactgttgaagagatttataaaaacagggaaaagttttctcaggaagtccagcgggtcgcgtctcaggatcttgctaaaatggggctgatcatcgtttcctttacgattaaagatgtccgcgataaaaacggctatcttgaatcattaggtaagccgagaattgcccaagtcaagcgggatgcggacattgccacggcagaagcggataaagagacgagaatcaaacgcgcggcggctgataaagacgcaaaaaaatcagagctggagcgggcgacggaaatagctgaagcggagaaaatcaatcagctgaaaatggcggaatacagaagagagcaagacacagcaaaagccaatgccgaccaggcatatgacctcgaaactgcaaaagcccgccagcaggtgacagagcaggaaatgcaaattaaaattattgagcggcaaaagcaaattgagttggaagaaaaagaaattctgcgccgtgagcgccaatatgactctgaagtgaagaaaaaggccgatgctgaccgttattcggtagaacaagcggccgcagccgcaaaagcgaagcagctcgcagaagcggatgccgagcaatacagtatcgaagcgatggctaaagcggaagccgaacgcgtgagaattgacggtcttgctaaagcggaggctgaaaaggcgagaggggaaaccgaagcggaagttatccgcctgaaaggtctcgcggaagcggaagctaaagaaaaaatcgccgaagctttcgaaaaatacggaaaagccgcaatccttgatatgattgtgaagatgctgcctgaatatgcgaagcaagtctcagctcctctttccaacattgataaaattaccgtcgttgatacaggaggaagcggtgaaaacggcggagcaaataaagtcacaggttacgcaaccaatttgatggccggtcttcaggaaagcctgaaagcatcttccggaatcgatgtaaaagagcttattgagaatttttcaggcaaaggaaacattaaacaaagcataaatgaacttactaaagaactcagagattcaaaagaagaacacagtcctgaataaaaaaacagcaggcgtacacccgcctgctgtttcagttcgcccgcttggattcaagaagccgcggagccgtcatgaataataaaataaggacaatggccgaaaggataaaagaaggaatcatataagtcgcgttgtagacgagcgaataaatccagaccggcgtgcctttcggagcatagcttccgaaaaagaccgctccggaaaccgtatgtgccgcatatcgcagcacactgccgataaaaacgccgcctataacatacgcagttaaggcgcctctttttttagctaatgccgattcgcggacaccggaagcaaacaagccgctgaaaccgagaaccgcaaacgccgcgatataatcgagaaatagctgcaccgggtgctgtaaaaataaattgccaatggcgatttggacaatccctgttaaaaggcctgtcgtaagtccggctttcactccccagcggaatgaaatcaaaaaaatcggaatcatcataatagagactgaaccgccttgaggcatccgaagaaacatacctgacacaatgtccagaatgacggcggctccagtcataatcgctatttcaattaagcgcacaagctgtgctgaatgattcatagttttccccctggtcagacaaccgttcaaggataaacaaaaaagcagcgcggggaaggatgggaaaaggtccgcgcgctgcttacaaaactgcaattcatttggctttgccacatccctacgccagcgttaactaacaggttcaaagggtcagaacaaaacgttcactctcagctttaatgctccccttgtggtcatcaagtatttagttcaatcttactatactagaaaatatgccaaaccacaaggcggcttatctttctatagaagagaaacagaaataagtatgaaagaaaataaatggtgactttttttaaaaaaactattgtcatattttcaaaagggtgttatattattaaacgtcgctgatgaacagcagacaaaaacaaaaagcttcgaaaacaacttgaaaaaagttgttgacataaaagaagctgagtggtaagataataaagctgcttcaacaagcggtaatgatctttgaaaactaaacaagacaaaacgtacctgttaattcaaagttttaaataaatcgcacagcgatgtgcgtagtcagtcaaactatcacgttcctaacgatgggaaaattcgacctatcttatctgcataccataacgatctataggacgccttcttaatcctcacatactctttcgtttcaaccattacgcaaccacctctcagccgtcttaatcgcgatttctgcgtgctcaatcgtcaatggtaccgtgttttcgtcggtcataaatagtgcgttaccgacctttccacgctctttgtaccacatcattacgatatagcctccgtaatcgttgtaagtatccgacgcataattatcacttaaaggtacgtatcctattgatccgcaagaatcatcatcacggtcagaatgtccgagttcctccgataatctgcgcagtttacccatcgttgcgcacgcccagttatccggcgaaaacacgccattttcaaatgcacatatcggatcggagccttcccacgtttttccgcgttcctcacataaacgacataccattacgcaatccctcccgaaatttttataaaaaatcgaacacacattcgtatttatgtggtacaatatacctgagttaccgaaaggaggttcgattcatgaaaatatcaaccgaagataaagtagttatcgctcttacagcggcatttgttttcgcattcagaaagcctattttcgctcttcttggacgctaattcttggcgtccagccgccgggcgcactagaaccacgcatcatcctcgccgctcttctcatctcctccactttcaattaaattaatttgattctcaatttcctcaataaatctctctaaagcttcttcatcaaccaatacttgtccatgatggactttgatgatttctttcattcggtcatccatatttctaaattcttctgcttgttgcacagtaaacattactctgtatttctttatgtataaaagaaaatctttaagtactccgatctccccaattttgtggagattggaatcttcttgttccacttctagccggagtaaagatgcttccttttctaaaacatcaatttcaagctgttttttctttgacaacaattctcgctctttttgttgcaatcaatcacctccttataaggattcaatatgtattcacagtatgaatgtggattatgtctttaaaccgattcatactttaaatgcttgtttttctttttgctaattctatactctgcaattttcagtgattcaagagtccatccattattgtttaagcttccgaaaagtgtgttcaataattggagctcttgttttaagcttcttcgctttctcaatatcttttgaccttttaacgaaagatgatatccctctgaagcattaaattttgcctcttctaacttgtgataaaattcattgagctctttatcaactttccccagctctttatcaactttccccagctctttataaaggttatcaatttcattttgaagtcgttgtttagtctcctcaattgcaacaagaggtttggaaatggaaacaagataatcttttgcagttttcatatcgtcactcctatatattattttatttttattcttaaagtatgtaaaaaaaagacaagcttttaacttgtctttatcttatcattcaacttctcaaaagtctataactattttatttttatccttaaattattttgagtaagtcacaaatgaataattaaatgtggtattgttgtctacttttttgtgatccttttcaattactctccaatcgtcatttaacctgggaaaatatgaatcgccttctcagcaactgaatcaacaatcgtcaaataaaccttatcagcatgtggtaagaatgcctcgtatatagcgcctcctccaattaccattacttcttcatttgtatccagttgaccacgtataagcttcaacacatcgtcaaccgaatgataaacgaatgaagagtgatcaggcttgaaatccttatttttagtcagtatgatattccttcggttctgaagtggttttcctgtaatgtttacgattgattcgtatgtaagccttccctgtatacacagctttcctgtagtgagttctttaaaacgtttcatgtcttcaggaatattgtacagcaaattattctcatacccgatggccattgatttgtcgcagcaagcaataagagatagcattatactgctacctcaaagtaaagcttgtctccatgtttataattaatcaatttgaaatcatcaattgtgaaatcataaaagtcttttacgtttggattgatccatagttcaggtgcttcatattgctctctgtccatttgaatttttaaattgtctatatgacgagtgtacacgtgacagtctccaatattgaagatatactcacctagctcatatccagtaacttgagcaatcatacgctgcaatacattgtactggaatacattaaacggattcccgagcgcgagatcattactgcgacagaaaacttctaaatgcaacttcccgccttttacaagccattgagtgccataaacacagggcgtcaatgccatagagtctaattcatcaggattccaaagcgttgtaatatgtctgcgtgatgatggattatttttcaactgatgaataagatagtcaacctggtcaactttctcaccgtttagcattctgttcttcttaccaagctgatatccatatgctttgccgatcgtaccgtcttcttgtttccattgatcccaaatatgtacgcccatcttgtttaactcattaacatcatttgatttacattgccatatccaaagcagttccttgattgccgttttccaggcgacttttttagtcgttaaaattggtatttcggaattatcaaaccgcatttgtttactgattacacttagtgtatgtgctggtgttccatctgtatcccacttggttctgacatcgaattcttcgtctgatgccccattattaataatgtcatttatgattgtgttgtactgcatatcaaattgactcataatttccttcctttcaattccatcgtttggtaaaatattcttgcctacataatggaaagaggtgatctttttgtctatttacaaatacaagccagcagtggttaaagaagtactggactgtaaaactgaaagattaacagactcaattgaagcaagatattgtttatcaataaagcttaacaataatttagattcttcatatgtgtttattatgttaaatccaagtattgctgacaaagaagtatccgacctcactataactaagttgtgtaattttagccactcattaaatgaagttggatccattcatattgtcaatctctatcctttttacgaaacaaattcagcggaattatcctcaataattcataagcttcaaaaagagaacaggagcctgtatgaagctaccgttaagactaatcatcaaattatagccaatttagccaaagaatctaaaaaggtaatctttgcttggggtgattgtccaaaacgattcgataaacgaagttttaataaacaatgccaaaatgttaaacagctcctaaaaggaataaataaagacgaggcatttgttatcaaaacccattacaacaggcttctcacagttaagaattcgccaagacatccctctagacctggacttaaatggctcgaaccgtttcatgaattagacgcttaaatgaaacgaccaataataaagttaatcacgaagataatattaccgcaaacaaatagcatgtacacaaacttgttttgtttattgtttgagtcaccttccaaaacatcaagaattttaaacattgttaaaccggtatagattaaagcaaaggctgtccaagctaacattagcaagttaccgtgcgtgatcagtccaatagtagccaaggggataatgaacgaaatccccttgaacaatgtaatggcatatactaagttcttatttttcttcagttctttatacggtgagttagaaagcatatgcgtaactttagcgtatacgttctgatctcctcgtgtaattaatctaatttcattaatatttagtgcaaataagtatgctgcaagtaataacgtaaagtatgtaattctaatacatccccttattttatttttattctataaataactaaaactaatcaaacaactctccagctctcttcatgtctttgatgtcttcactaacactttctttgattgtctgaggtagctggtcaattcctcgttgtattcttttctgacctgtatttcttatatgtaaagttaattctttaaacccttccattgattcatctgaaattaaatcaaactgatgttgaatcttagctagtaagcttatatgttcttcttcatcctcgctgaataattggaggccttgtttaagattttctatttcttttagatgggcttttattttctctatgtgtttatccatgattgctaaacctttcaacaatttctaaaacttcagcgagcttatctgttagctgtcttcccaggtctgttttttgtttctgatcgagtttgttcatttttcctttgcccctttttgctttaatttgattctgtctcatataatcaatggaattttatctaaaacacatagttgcacacaactgggattgagactgcagttttctgcttagctctataaaaatcattcaccagctcaatgtcaccaactacatagctaatgtctctaagttcttcgatttttttatcaaccggaaaagtgtttggacagtatgtttttcgatttatcaatttaattagagcttcttcaatggtttgaatttcaaataacagagtcccatcatgtgtgctatttgcagtcagtttataatcaaattcttcgttaacactttcatcataagacacatgtccaagcttaagattttttaagtctccatgataatcatctaaataaccgcttcttttaaaaaagaaggcaatctgttcatttggatttaagtattctgtccgtttattcatgtttttcctccttattgttttagataaaagtcttcttttatagagatgttcgttcaatcgacatcctttggtatccctaaattttaaacttgtacatattccctttcctgtctacatgatagtgtccttttggataatatacatgtccatctgcatttaccttatcaattacattaaacatgaattcgccatgttttatattccctgtcatccacacctttttacgcaatctttttttcatccagcatctcctttgtaggtataattgttgaattatttgagtattttaagttgtaccctggctatgaccctccactggacaaacatcatgatctaagccagggcttgtattacttagttccagtcgatccgtgcccacctcgatcatcgtttcctagatgatctacctcaatcaattcaactgcaggcatctttttcataattctgaactgacagatccgatctccctttttaatctctgtatcacgcaatgcataagcaggaaagaaccagaaatcgttgtctcccttataagactcatcgataacacccattgagttggtttggataacgccaaagttcttatatgtacttgaccgaggtacgacatgtgcttcatagccttcaggcaattccatggccacacctaatgggataagtttaaattcatctcttttgatcgctacatcttctgctgcacgaagatcaatccaatcaccttgctcaattttgctgattcttgtttgggtttcatctaagtatttgattttaatttgcattatgtattagctccttttgtttttagtgtttgtaagttcttgtataaccttcttcagttaaacaaatgactctttattgtttgaactttgccctcaactcttcatatagtttacgatcacgttcttctttctctttgagatacttttctctttctgcctcttccttctttttcaactcattctcatactcttcccactctgattcatcgatcacccctttttcatgcaattctcttttcaaagggtgtaatatcttcttagcttcatgtgggtataaaattcttgtctcataaccatcatcccagtcagattgttgacaaaccataaacacgccgccatccttagtaataatagtcgtttgctcacaaaattgatttgcccaaacataagcaacttctttgccgattaacccttcctgattttcaatgaaatacatttattagctcctttaaatttaagtttgtttaaaattacccttttatcgtaattcctttaataacaaatcaagttcattgggcttaaaaccaatacttcggtttacttcttctccttgatcattcagcaaaatggttaccggtactcccataacaccaaatctagctgccacttctggttcctgtgtaacgtcaactgtctcaaattgaatatttgcttgttctaagtaattggacaccattttacatggattgcaattaggctgctctaatttaattactctcattatactgatacctcctcaaagtacttaagcacttttatttttccaattagatttcttaattagtttaaaagtccagccattgtagttcgagcgctcccctcgtaagcatttctgtattattgcacggtgcaagccgaactttttagaaaaaggtcgaaggccctctactcgtataatttcaccatcaggggatttggccataaagtgcaaacaagcattcgttaaatctcgatatgcattattgatttccctggtgacaaagcaacaagtttctagggaataaatcttttgacttttcggtattctttgttgtttcatgtctttatcaagaaagagttttcgcttattgaaaagatcctcatcatatccctctatctttgaaacatcttctagaaaattcttaaaacaatgccatctctcacaaactctaatccctgaaccgccatagttagaatactgtgggcaactgacatcgtaacaccgttctagcatccccttccaaacggagtatacattcttcacatctaccatctttacatcaccaagataccctactccgaacactgagcgctcatatcggtcttttatttttccacgtttaatttcaatcttttctacgtcccgttcgtatccggtctttatgaatcgtattctaaataattttgttccatttttcttttgtccatttgtccgtagaaccttatatttctgaccatgattattcgagaacacgctcccgatcagatctttttcaatcctcaaaataaaaatcctcattttttaaggcttcagcagtagccttcctgtaagaattccctttttgactaaagaagtccatagacttggtttttgtactcaatccgttcaacactactggattaatttcttcttcatggaaatagtggtcgaatcccagattatttaaggctttatttgcgttatagcgaataaacttttttacatcatgagttagcccaactggatcatataaatctgttgtataatcaagctcgttttcatataagtcgagcagcaaatcaatagtccatttatacagctcttttttcttgatttcagtttgtttgctatagatttcctgagccagtaatccagtgtatacgccgtgcagtgcctcgtcacggataataaggttgactatttctccgctattcattagcttcccttgtccgtagaaatataacggataatagaaaccgctgtagaaaaggaagctttccagatagacggaagcaaccatcgctttaaacagcgaaatctcatcatctttttttatggcgcggtacagtccgacgacggtgtgggcttttttctgcaagtatttattctgcttcacccattcaaagacttcattgatctgctcggttggagccaaagttagaaagatgttgctgtaagacttcgcatggacagcgttttccatcatggccataaagtttaatactgcttttctttgatgtccctcaacgtgctcggccacaatcggcatgcccgtgttcccctgctctgtgtctaataaggtaagcccagctaaaactttcatataagtatcttgttcctttgttccaagatacttccaagtgagaagatcgccgtttaatgcgatctcttccggaagccaaaactgctttacgttttggttgtaaaacatttgggtgaaatcatcttcatgctttgaccagtttgctgctgtatactgaatttttttattaatgagattttcctcccctgttatttgctataattatcataaataaaatgaaaagaggtttttgtattgtttatttctggagctctaccttctgaaactccttgcggtaatactgttatttatccaattaaaattgactctatgaacatccaagagaaaaaatctattatttttatgattcattgctttgagtctgccaagtcgtatcttgttaagccaaaacctagaaacggttctcgcgttggtcttgaatatataaaaaaaggagatcctaacactattgcaaacgaatacgctaagttaccttggccagaatttgagataaacgatgataatggaacattcacctataaagtagctccttcagatgaagagcgagactcattctttaaacaacgcaactaagacacccttcttgagtcgtatcctttgttcttgcataatacagtgttttaattcctttatgatgagcgtagagatctattctatttaggtctcttgtcgtcatcgtatcctttaagaacaacgtaaaagaaattccttggtcgacgtgctgctgaattgttgcaataagatcaactaccttaaacatatccatgtcgtatgcttccttataaaagaaccaattctgagccgataaacctggcattggataatatgtcttactgtttccgtatgtacgttcctcaattctctccataataggcattacaccggccgtagatgattgaacatatgagatgcttcctgtaggtgcaacagcttgcctatacgaatgatacaacccatatttcataacatcctctttaagcttcatccaatcttcaatgttaggaatatgttgatctccaaacaggcttttaaccttttcatatttagggctataatcaattgtcacgtacttatcaaaatactcgcctgatttgtaagttgatccgtgaaacttgtagtacgtctcccctgtttcttttgcaatttccattgaacgttgcagggagtagaagttaaccatcataaagtatgtatttgcaaagtccttagcttcttcactttcataagcaattttattttgagctaaaaaaccatgtagattcatctgcccaagaccaattgatcgcattagtgtatttgctctcgcaactgctggagcatttacaatgtttgttttccttgtgacagttgtcagtgagtcaattgctattctgactgttgaagcaattgattgattactcattacatttacaatgttcattgagccaagattacaagagatatctaagccaatttcatctacctgatcgtaatctgtataaactgacacttgtgacgcttggagcacctctgactttaatattcaacgaaaggcgcaacactctcgtccgttctcttatgaactgcttacgatcactcgtaagaatagactatatcatcgacctataaggccgcccgccgtttccatcgccatatgcttgcgatgtactctactcccttacgcgtatacgtggtttcgatagtcgttcggcatttccgcaaggtgcggtttagcacggtattgtctattgaatagagtttcaccgtttagacgggtttgctacgatcattgctgaccgaaggtgctacagttaacacaaattagaaaacttcacttttgaaatatgttcatttggatgcactttatttacattgtcagcaaacatgatataaggatagccagattcgcttcttagaatggccaattgctccaacaactttcgagcattgccctttgttttcctaactttagggttttcaacaagctcatcatacattttgttgatatccatctcatcaagatactgcccatattctttgtaaactgaatgaggatagagcatgtaaaaatccttatcttctcttgccaattcaataaatttatcaggaagcactacaccaatagacagtgttttaactcgaacatcttcatctgctgagatttttttggtcaactatccccctatttctaagggggctggactatatcttcatcttagtaagatgctttgcgcttcaaccggcgctaatctccggcttacaattagtctctacaccttccgagcacctgtaataatttttgaatttggggttgtttacacgactatttattgtgtttctactaatatttagtcgcctacctgcttctgacatagaatgatagtaaactccgtctacaataatcccgaccctatttccgttgttaagactaagcttaagacaagtttcttttgtcttctttcttcccttacgagataaagacattttttgcttagtttcctcagtgtgcttccttccatcaaaacgcttctttattttgctccgcattttctccatatgttcaggcttgtcgtaccaataattttttttccctgaattaattttggatgagttacgtctaactttctctgaatgagtcttcccaaacataggatttttttctcccttgtaagacattccaaatgcattgtcataaagattgtataactgttctttttcagaattggataggaattcttgttcttttttatatagatcaaaacgatttatgcaatcagagtgatacaaaacttcaaatcgaaaattattctctccatatgtattaaagtcttcttgtaatggcttattgtgatgtgaaccagcttttagtaatcctaaatgcgctgtcttccttttcctgaaatttgcgctacttcctatgtagaacttgtcgtttttaatatttcttattttatatacagccttcaatgtttcacctcctttcgtgctcggcttggcacgggattgccaccaccattatgtgctgaggttcccccgttagccctgaatcaggacaccgcttttgcttgcgttcacaaagttttcactgccatattgctataacaggcgactaccaattaatcgagaaaatcaataatatctggatggaatacatttagataagctgctccagacccttgcctttgcagaccattcagacgtgttcgctaagcacgcctcgccatacggctgcttcatgttaccatgaaggttagactatatcttcaccctctaagggtgcctcctgtttcgactgccaatagcttgcagcctacgcctttcggctagtcgttgcacgttcaagacgtttgatctaagtgtttccacttttgccgcaaacagatttttttaatgattgttttactcgcatatgtatgtatttcagagagttctttaatggacttaccacttttaaaatcatttaaaattgacagtgcttgaatttcagtaattttagcctttgggcttttttctccaatcaaaagcagttcatgttttaaagcatgctgagcatttccttttggtgtaacccactctaaatttgagagctttggattcgctttgttaccgtcgatatgatttacataaggcaaattttcaggattaggtataaaattgagtgcaactaacctatgtactcgtttaccaacctgcttaccttccttatataaggtcacttttacatatccttcaccatcaatcttagtctttaaaacagtgttctttttcaaattaatcactctgctatgatttgtaatcccgtacccagggaaatcaggaattggagtaactatctctcccttcattaaaacaaagggaatttgtgttttccttagccccatctttattgcacggtgattaattgcttctctggaaacgcccaatttttctcctatttcttttgcagtcattgaactataattttcgcgaataaaattctcatcaatatctaacttgttatgcggtcgtcttgcttcgctcatgattgtccccctttattttggcttgtgattgacccaaaccatctgaggagttcccatgaattaaagaggttttcgatcgccatttctgacgaaaggggccaaatcaacccatttggtcagcgtagcggaacgcattatccaatagtttcataacacctacgacgcctttagttgcattctctacgtctttaattgcttcacccttggctcttagtttgtttaggttcaatgcaacaccgccgcccaatttagacagctgcatggaaatatcgatcgttcttgaaatgtcgtttaaactgtctcccacttcaagcaagaaacagctcaccatttcgcctcttcgcttacgtcccgcattaagaaaagtaggtgttgccggttgatactcttgtttcatcattgcgtgtacttcctcaatagccttatcgtaatcaccatctgcacaatacaaagctacaattgagacgcgatcctcatatctctccaggatctttgttttatcgtttgtcttcaatgcatagtcattgtagaacttaaatgcactcatgaaagaagggaacctgaatttgtaactgtaagcaattttaaaaatcgatttaatctgctcaaatgtgtattcacttaagaattcttcttcgtaataatcatttttaatcagataatccagtttctcttttaaatcatggaaaaagactgtattttgattaatgtaatcaacaaagtaactgtgcacggcctccttatccttctcaaattgaaacttaccgtctttctgaatcatgatctcattattgagtttgatccactttggtattgtgtttgtcaataagttgtacctcccgattaatcttctgcaaatcttgttttgttccgcttagttcaaactttaataacaatggtacgtggaacattgctgaaagcttgtccccagctaaaccatagttatcaccccaaaccttgttaccactcaccgcaactccttttattttatttttattcttattgataaaactcaaagtcctttcaggtacttccccaaagcctatcgtatatgtaatatgtatgaactcttgagtgatgatcgtatcatcagttatttcaattgcctcaatgtctaactcttgttgcaacgcttttacaaaccttcttacattgccagttttactctcatatgtaatgatcactaatcgttataggctcctgtaattaatcttgtagttgcacattcagcttcattttcaacatgattaaatacttctgatatctcacgattaatgtcgcccatttccatgtagccctgtgccatactttcatataaggaactcttcttaactggaacgtaatcatctagattcttttctaattcaacaaattgatttccctgttggtcagttgcaataatctctccttttaatacaggaaaagattgcccatcagctaaatgaatatgagtgttctcatcggctattgtaaagctaataatgttcttcttttttacatattgttgagttggatcaatacgtctagctgcccccattttacatctccttattttttaatttcattttgaataaagctgtgattttatttaaactaaaaccaaaacattgtttttgatgtacttgtctatttctgattttgtataagtaagagtactgtcggttgtagtgtcagttatttcgaattgttcagtattatgattcattcttgctgtgtatacagtattgctgactacagcaatagcttcttctgatagcttaaatttaaattcgtttaaatcagctacttcatcaatctctcttacctcatgcggtactccgctttcttcttgagcgtacacagcatctttatgagcctcaatagcatcatcataagtgccaacaagtgttcccatgcaataaagtccgtgttttttattcattgtcatcatccttttaatttatttttgtgaacctcttaatctctttaccttcaacagccacatttccaaagaacatttctttaggtcttgcccaaagtaatccgtcttggtcttcatatgtaaccagcttttcttctgtttcagtgtgaatgacctctccaataaccttatacagaccgcctttataatgtctaaaccagcaaccaactacttcgtatgtatccttcaaagcattcaacaacttctgtgcatcttgagcactttttgaactgctgtcatatttgctgagatgtaaaaccgcttcctgcattttcaaattcactttgttcatccttcccggttcctcgaagtacattaattctattcaccatttctctaagctcttcaagcttcacttttgcattttcatattcccactctggataatacaaagattccagctccaaaattcttctcttgagtagattgagaacttctgataatgccttatccattccaatttcctcagcagttgtgtttgaatttatcagagcttctcgaatacgttgagacttcctttgacttatactaatgtctaatcatctccttaaaatcatccttttatgcagtttccaaaagctctttcatttagcttctctccactcaaaaccgatattaacgtttgcttgtttaggtctgataacttcaactgtgctacctctgtcagacaacctgctttttaatgccttcatatccttgtatggcgatatttgaaaggaactcagattgataagtataacttcatgtttatctttagcggcatactctctgtctagtgttctaacaatgtatacatgagcatcatttattttaatgaagtacccgtcctctatctctttcaccttcggcttatctgcttcgttctttctaatctttaaatttattggcattctcttcccccttatttctataaaataaaacttttaattaaatctcaatcaactgattcgtatttaacccttggataagttgtttgcatataaacttttttcatgcacaatggacattgaaacggatacttcggtgggtttgatgtgagcatcatatttgcaaacacgagctctggagcttcctcgcattcatcacaatgcaacgtctctctaaaaactttaacttgctgcgatttaatcatattcagattcctccttcgttaaataaacaatgtactaacatacagaacaatcaatgcaaaagctgaatacagtaaagacttacctgctttcttgaagatattctcgtttctttcttgatctgactgttttacacctttgacaaatatattaagtaaaacaccgataacaaatgaatgagataaagtaacatgaacattttgaatattgtatgtatcaataagcaatggatttaacacatgatttaatccgtaataaacaactagtgacatagtcaatgcttcaacaaaaatgagcaatccaactacaatcagagaacctgatccgataaagaaaccgttccgaatatcttttgtatccttattcaataaatatctctcctttagtcttttttaattagcctcttccaccaggaagttttacgtttttcttcttgctctttaaagcgttcatattcttgtttaagttgctgattaaattcctctattttatcttgtgtttgaatcgctttttcaaggctttctttatcttcaattgttttaattaccttgtcagtctgatatgtccattcattttttgtattgcgctgcctgtctgttacgactacgtattcgttaaaccctgggatatacactttcccttcgatttcaattgggtctaagtcaatgatcccttcaaaaaatggctggtatctacattgcttctcaattgggacaagggcatcacacaggtctaatgtccaacttttcttaattaccttaccttcaaatgttgctttatggcgtcccacttattcacctccttaaatgtaactgcctaatgtgtaatctgagataattccctcttcaattaagtaggacataatttcttggactttatcatgtatgatatgtggaaattcaagtttttctcttgtataagcattcatgtagtactgataatcatatggttgcaaacatctttcatttaaaatatctatttcacctttgagactgtttttatgtattgttaaattaaatgtgatgttaggctggattgattttatgaagtaccactttgatttcacgtgatctgtaaaaccaatatccctcatttgtttctcttcaagtatgtgaaacctcatttttctccctcattgatgattttctttaaggcttttaaaagcatgtttagtgatttcttgtcacccatttcatcccgattgacctcaataaagtgaattgctgacgttaatttatcctgcatttcagttgctcctttcaccataaaaattgaattttatctagacattgttgataatcagtaaaaccaaacctgccaagaataacaaaccagctaaaactaataatcctagagctatttgagcttttattctccttttaattccatatgtatctagtgaaactattccaatcaacaaaagacccgtgatttcaagaatgttaatgactagctgcaatattttcacactcatccagttttgcaagcttgcaccatactcctaatgagcctcctgctttcagttcttgggctgcagtcattgcttgctctcctttattaaatactgctacctttccatctaagccagtcatctttccaacgaattctttacctgcatagacctcaactacccatttttcattgttcatgattattctctcctcattatttgttttgatttgtcgtatactgcgcttgcccgggaaattgtgaatattccttctgaacattttccttgctcttgttcatatcactgtaagaataactccgagaaggagtgaacatcctccgattaagaaaaccgtaagataaaatggtttgccttctttaaagttcttattctcaaccaaacatgccattccattgcctaagaatattgatccgaataagatcagacccagtatcaaatatgaaattacattcatcgcagattatctccttatctactcatgagttgattcgcgattagctttcattgtagccacaaagctatcatcaaaagctttttcagttaatacatgcttgctatacggttccactaatgtccagattcctcttccttctttttcaaccctcaatgccaacttttctgccacttccagagaatcaaaaatcaaatcttctcctgtgacaaagttgttgtacactctgcctttatttgtctccccatcacgtctaaccactactacccattgttcttgtttcatttaacatctctccattctagataaaagtaatattttatttttactcttaaagtagttgcaagtattccaacgtcttttctaatttcatgtctttacaattctcaatgcattctttcttgattgcttctccgcattctttatgtacctggaattccctgtattctttgttgtcggatattcttatgtaataaacgatctcgcctatgtgatccttgcatttaacacactccaatgcatcacctcgcttcctatatttctaatatactcgcattctctcgaacaatcaacaactattttatttttattctcaaaaagtttcttttaaatttcttagctttactgttgcagccaaaatatccgaatcacaccttttccatatacggtcatcctctggccttaaattgttctctaagtaaacccaaagcttatccagtatctcctcaatctcatcaacgtcattattaatgatatccctggcaatatccctaattacccgaaacctcctctacgagaatatgattatagctttcccgttgtcattctttatgtacggcgaatgttttctctgaaggtaatttgtctccttaccttccccagtgctcacgttataaacagtctttaccttatgtatgtctaatgccttccgtttagcctcttctgtagacgttgcttcaattaccaaagacgcgttttcgcctttgtgattcctacatctaacatagtaccttttcaataaacatccctttatcctttctttttatcctgttgtattaatcctcttttaggtaagtcttaaaaaactcttctaggtttgcagcaattgcaccggcaacttctgcacaatgagcatgactcttttcttgagatcttaaaaactcaaccgcagacttagcaatggcttttattttcccctcgtctaatttgccgcttcttacttcatctttaattttttcggcttcctcttttaaactttctggatagttaaccacaggatcgattcacctcttgtattttatttttactctttaaaagacaaattttattcagattctttattaacgtatgtatgtattaattccttgaatattgactcaagtacagttacagtaattgaattgccggcttgcttgtacaactgcgaattactaattcccactgataaggctttctcaaaatcttcttcatcaaatgcttgcagtctccaacattctaatggagtgagctttctaattctgtattttgggtattcgccaattgctacaacttgacgatcaattgtattaacagtgaaggccggttcatcgtcttctttaaagcgtctgccattttgtcttttttcttccctttctggagttaagacgggtcttatttcagggtttggcacagaaattttcaccccttcacccttatttgttgttaaagttgaacttagcccatttgaattgtaaacctgaccattcattccttctcctgaaggattaatattaccaacatactcaacagcaattttaggttctctatgacctcctcccatagttgttaatgttggtgacaccccatcaggcgagtacactcttttaattgcatcatgtccttttagatcaatgtgaccaatcatgatcgggtcttccactttgtatagcgaagtctgccctccgagaccacctaccgattgggatgtcaaagttgttgcaatgccatttgaatcatagactctattgccttgtttaaagtttctggaatatgtttttccgttattcagccacctctttcctacgttaatgccaccaacaaacaccacatctttttcttttggtttttcaatttgttcaatcagtttagatgttttttcttcgcttaagtaatacttctcatctacatattcctcaagaatttctcgcaatctctttccaacaatatcttgtgcagaccatttaaaattgaaactttttatatttaattcttttaatctcttttttcccttacttaaaacatcgttccttcccttttcgacaatccattcgtcattttcaattaaatcctcacgaactccaattatgtatatacgctcacgattctgaggaacattgaaaaattttgaattaagtagctctaagtcaattctgtacccaacttcactaaaagattcagccataatatttaatgtatttcctttatcatgattgatcaaccctttaacattttcaaaaacaaaataccgcggcttcttctcttttaaggtatctatatattgaaaaaacaatgtccctctagtatcttcgaaccctttccgataaccggctacgctaaagctttgacaaggagatcctccaactaaaagatcaaattcaggcagttttttcttatcaatcttgcttacatcaccaaaatttgattgctcatcaacgttgtgaatcgcacaatatgacttaatagcatatttatcaatttcactaaagccaaccagttcatattcaaccccaatgtttcttagtgcagcttcaaacgcaccgattccactaaaaagactcattactcgtagtttattcaataaacaacctccatatattttatttttactctaaataaaattgatcttttaaatggaatcattcaaattattttccttcaattatatttctgactcttatgtttagtgcttcttgttctatttgaaaagaagtgtttgtctttatcgttaaatatgtatcagctagatgattggcaacattacggtatatcggatctgtattgtatctatgaaattgctcctcttcagtctcttctgtcaccagcttaattacctttaatgcttggtctagactttctctatgcttttcagtgttaataataattttcacctctcttcaaaagagatattttatagtaattttcgttcaatctctccccagttcataacacgaataaatctgttatcatccctgttatgcggtgcatcaaaaagtatcttcattccatcaaatgtttctaagttatgtactccgtcatcaatcatgatatctgctttaattatgtttttattgccacaaagcacaacattgctatgtggaataaatgggaaatgctctgtgagccattctaacttagctttaagggattctggatggtttgttgctgtagtaacaatatatacttcatattttttcgtcagctcctcaactgccctctgactcccttcaataacatccagatgtctgaacaattcataatccaaatgtctataaacattgttttgggtatttgaatatttgctaatatcccagcacagtatatcttcctcttttagaaaaggatcatcgtgggcattaatgtaggctacccaatcacttaataaatcagctaaaacttgatccatatcaattgcaattactttcttcataaatccccctaatccactaaaaagattatgcctttagcaatttcttcgctagaccactgttctgtatcccatgaatatgtatgtaatcctgcatcgctcattacttctctatataactctaagaccggttcaatgtctcgatcatttatgtattcgtcaccccgttcaagtaaacgttgcttaataacttttggatcagcatgtaagtagatcactttggctttatctctaatcttcttctcgattgttctttgctgctcttccgttaaaattgagtaatccttgaacttcttcgcataaaccagatttgaatatatgtatcgatcaataattacattgtcctcatcggccagcttgttgaagtgttcaaacagcttctcatttccgctcttggccaattcaaagctggatccctttattaccggatatccgagttctttgcctagcttatctgctactgttgatttgtagcagcagtcagtgccttctaaaataatcatcgtcatttatcttccacccttcttacattactgaagccaagcactctatatgagccgtctggatactcaacttctaattgttcatatcctttatcaacttgcgcaacaacaccaatctctcctgtgaaacccgcaatcaccttctctccctttttaaacatataattaacctcctttagctggatttaattcatgctccttgaagaatgtaatatcacctgtttcatcactgactgcgtaatcatatgtggcagagtgtagcagctcaataattttcccttcccgtccaacatgatgaggacaagcgttccttgcattctcatttatgatgacttttaacccttctggataagaccaaaacttaggcaattaaccacctcctaactaataattgagattgtccccttttgcttaccaaaattaattgcgtcacgctcggttgctacaagcaagtccactttatttccaacgattgcgcctccagtatcaattgcaattgctttgaacgtttccccaccaattcttacttcaacaattgaattcaaaggaataacgcttggatcgcttgcaataacacgataccctttataatagattgattgagtaacatcaacacctgttcttgttgttcctgtgcatccttcttggcagtgggcaatataagcactcagcttaacctggatggttttctttgcggccagcggcttgtttcctttccttttaatattaattttatttttactcttaataactctatgctttgccttctcacctcctctcatgtgccttttcttactttgcttaggtttaatgagttttgctgagacaatcttctctgtatgcctttttaattgctgttctttgttcgtttgagcttttttaaatagccgtgagacaatattctcacttgatggtatactaatctgtctagacttcttataaaatgattcttttattgagtcttcatttccctctgttttatgtaaatgttgctcataacttatgtaagaaaaagtggctaacggaattaaaatcatcataccataaacagatctgaaaatgtgtgtttttattttatttttatccataaaatttttattgataatcctgcctcctatgcttcagctcttttggttgttagactgatattccctttcctgtcaacatgatcaattctacagaccgtgtgactatagatgctgttcttatatactttaggaataaaattgttgcctcttctgaatccagtgaacatgagcaaagttcctctggtataccaagacttctcaacaacctcttttttgccgccagcaacaggtcgagaaatctgtttattataatgcccaaagctaccagcccactgtttaactgtaaccacccctgtaggtgtaaggagtgtgattgtgtgcttgtttttatccctgtctaatacggttcctataattcgagtcgtttcatattcatacagagtttttcctcgccattgatatggtttccctttgattggctcttctggcagctcataaaaatcagcaatatcatacttagcaaagttaacaccagaaagttcatgatcgttatagtaataactcaatgaatccatctcccatttaccaagagatccatcggcatacttagaccactctttcttaagtaagcaattgttaagtccacttaaggcttcttcagtcgatatccagtctttgattttggacattttactgtcatattcttttttaaacaatctttctgatacaacaagttgtccattaatcatatcaacgattccgctttcactgaaatgctgattgtaaaagtcggaagacatatcatctaataagaaaagcctgtcttttggagatttcattgtcttgtaaatctttttgctgatgtattctttgaaacggaagaatctaatttctaaagcatattcctggggaacaatatcgttttcgattagcatttttaaattcgataaagtcagcttggttttaggctcagatatcaaactaataaaggattccattattttttgtctatcaccaaaagaatcaaaacaaccaccttttattagttggattacctgtccttttttaaggatgctacttctgaacattctttcgatgaagtcgtcaaagtcactgtatggtctatttgcaattatttgatgaacaacatcgtcaccaattccattcattccttttaatccaaatataatagagttactttccgtatctgctttaaaaccaaaatttgcgctattgatatcaggtaaatcaactttaattcctctttttctgatattccctatagctgcagccactttcccatagtttgtggcggctgattttttggtagcctggtcttcttcgctttcaattccaccactgttgaccgttaaacaagctgtgctccaatataatggattgtacttatagttaaggttcaattcttgaagagcaataatagaatatgcaagagtatgcaggctgctgaacgagtatccgaattgtcttttaaattgtacttcccagacatattttaaaaggttttcagatgttcccaagcttcgccctttctcaaaaaacattgtctttattgcatcaatcatttttttgatttttttggctatcccttttcttagcttattagattcttcaatgctaaacccagcaatttctttgtccatggataacatcataactgattcctgtgtatctgcgatcccatatagaccttcttctggtttatacagatgttttttaagtacatccatttcttttgaacttaaattgtaatttctcatttcttgataccagtggtcgatgtcttttttaaatcttacatatgtatctacaggctgttcttccccttctgacatcagtctcattaaagaatttgttacggctgtttccaataagtttttcggcttaactttaacaacggattggttgcccacttctgtatcaaactgaaacaaatccattatttctccttcgccagccatttcccatattctcttagagttatactccaaagtgtctggatgcaaatacttagtataagttctttttaaagttccttgggactctatttgattgtcttcgataagctggtctaaggctactcgaattttatctaatccctcaatagtcaatagatcatacttaactgaacccattgcttcactgtcgcccatattgaactgtgtgatatatgctccttttggtgtcctcatcattgcgtttgatttggtgtattcatcattgaatattaggacgccggctgcatgagaagatcgtttgttagttaaaccttcaattttcagacaggtttctttcagattgggatatccctcgacctctctaataaattccttaataggctttcttcctaattcttcattgccaaagaaacaatcggagagagtccagtttgctcccctttcaaatggaatcattccacttaaatattgagagatgtcgttatcaattcctaagcctctgcaagcagtttgaagtgcggatttagatttctcagttccaaaagtgcaaatctgcagtactcttttttctccaaacttgtcccttaatgcttttaagattcttggacgcttagatccttcagtatcaatatcgatatctggcaaatctggtctcgatttatgtatgtgacgccaatgaggaaggttgtactgcattgggttaatttgcgtaatgtctaagaagtaatttactaaaaaacctgctgcgctcccccttgctgctccaactaagctgtctcctccacattcatcatcccaaattgtattgatgatttcccggacagtaacataataagatgacatggcctgttttagcttctcactaatttcccatagctcacccaattctagatcaatccgttttaaaattgagtgcaactcttttttagacatatcctttttcattagctttgccttaaaaccatcttcaattagctttaacaaatacctgtcctgttcttcatcagattcagccattaattttatatatttatatttctcataagccggcttgaacaaatgggataattcaaactcaggtaaagccatttttggaataattggttcgtgctcaatagtatagtcttcaatcatctctccaattagcaatgtgttttcaatggcctctttgatgatctctttgtccaagtagtccattctctcatgaatttcatcaacattctgaacaaaacatgcctcataaaaagagtcgacttctctctctccatccttggcgtttaaaaaggcttgatgaattgccctgtcttccggtctaagaaagtgtgcatcggttgtgacaatcactttcaatccataaccgttagctatattaacaagtttcttattacaataaatttgctcttcacttaaagctggctgaagctcaataaagaacttatctttcccaaagactttaatacaccatgttataaactcatgaatttttaatttgtgctgcttgattgactgaatgtttccactttcttcgcaatctttgattctgagtaaattgatattcacctcagagccgagacaagctgttgtagcgataatgtgacctggatctttgctaagcagttcttctacatcctttttaactgttggcactctttccattgttcctgtgtaaaatgaatttccccaggcttgtgaagacagtgttcttagctgctcatgtcctatagggtcgattgccaacattaaaaagtgcggaaactttgtctgtcctgacttataattatcacgaacttcttccagtgaatcgactaaatatgcttcattcccaagtatgagtttaaaatctgcaggcatatcccctttcttcttcatttctctgacagtcttaatcgcttccaaatgagctgaaagaacctcatggtcagtaatggctaatcctttataattcatctgaactgctgttttaagcaattctcctactgaatttgttgaatcgagaagccttatgttacttttatcagtgtgacagtggcatccaatcaattttcatcccccttaaaacacaagctcttttttctttgtgcgaaccacctccaagtcataaatttcaatttgaggtgtttgtctgcccttatattcatttacccttgccttaccaacaacattaagtattaaagttccatttgattgagtaagtttctcaaagtattctgtatcacttttaaagcgtatgtattcaatatctccatgtttaaacttgactgttgtcttgttctttttcccgatgtgttcaatttgatcaacatcaacttctagttctgttattgctactaatggttcttcgaccttatagccccaataatctttatagctatacagcttaattaaaaattcctttctaagttgattagctggtatctcaaaatcaacattttgaacatcttcttcaatatctatgtctttaaatttttcattcagcactttgttcaccagaattaagttctgtcgtttaattgcaaaaccagctgcatttgggtgaccttcaacaaactcaaacaatccggtatccataagcactttcttaaaatcctttatgaatcctttgtcatacccacgtatagagccactcaagatatctttacctttttcgggatcgtttctggctaacaagaccggctttttatattcttctgcaagctgattggccaccagtccagttagacttttatctagaattccttcaatgtaaacaatgagtactttattcgctgttaaacttttctcctctattctatttttaatttccgctccagctgcatctgcaatccgtttctgctttgcttttagatttcctagaattctaactgtgtcatcatgtattgacacaagctctgtttcactttgcccacgttttttgtagggaaccttttctttagaaagaaggaatgctctcatcatttgatctttttcttcactgcttccaaccctaatggcagcgttaattaaagggttaataaagaactgtgtattctgtatgttcttatcgcctttggttgaaaaatcttgcttcttaaacagcttctttaataatggatgcttaattttcttcaagccttcattcataaaatacctggtttcaaggtttcttgaatcagccgaatcagcaatgttaccaatagatacaaggtctaagaattgttcggcttcatttttatttagcttttcatcaactgcctggcaaaatttataggccattcctgcacctgttagagttttattcgaataattaggtgaaagttgattatttactacgatcgcatgttcagactctcgttcacattcatggtgatcaataacaattatttctgtgcctctcttattaagagcttcatgttcctcaaattgacttgaacctgcgtctgggattatgactaagtcaacatcatcaggaactgtattaataaaaatcccatgttccttcccatcttgaattctgtaatgtatatttgctttcggacaaatcttctttatataattgataatgattgaactggatgtgtacccatctacatcgctatccacttgaacaaatattttatttttattctctaaatgctttattaaacaatcagatgctttatcaatgttatcgagttttgaaaaatgaatgactgagctctggttcacatcaataaagctcttcggattttcaatccctctgttttttaaaattgtcgataatggattgaaattataatcattgttgccaatgagcttataagccactaaattcctccttcattcgtattgatttcaatttttcttctcatcaactcctctaaaacgtcttttcccttatcagctggactgtctttataatccaacatattttcaaaatcccataaaacatacacacgaacatacggcgtaaattttgctgcaagcttcaagatttttttctgatactcaagcagtttacgttgatacatttccaccgtttcatggtctttcggcggccggtatttatcgagagcaataaacacttcttccactccaagagaaagtaagatatcacggtgaaaatttgaaatgttgtttgaacagactgcacatgtgaaatttgcttcaccataaaagtcctggcattttaaaacagacttttctgattcaaaaattaaggcttttttaaacctttcaattgaatcttttgttttatgtaatccatataaattcatcatggtctgatgattatacagggtgttcccaacttttaaaggcatatatttatagccggcatcaacttcctctttaataagagatcgtctacgtatgccaatcaatctattatttaaatctcgatgtggaatggttataccttctgtgtagcttctaaaatagtagccaatttcaaagtcatttaatgtttgcatggtgattccctcgtccagccacatttgatgaggataaggcataaacacatctaaaacagtttcattgaagctgggaagctcaatgtctatctttttcttcttattgaacttccccatccattcccagtcatcaattaaatcattgttcgtgaatgtctccctattaccaaagccaaatgttctcccagctatctttgcaacatactcaatcgcttgattgaaaggtatattgatccctttttgactttttgctcgtataacaagctcaaagacatcgaatgtgtctccacattctgtatagcaatgaaattgctttgcttcgtgataataatacagcttgtagcttccaccagaagtgttatggcaaacggttctgtatattgggtttccttgttgatcccattgattattttcgctacccaattcttttaatattttatgtatctcctcaagcgtaagactttcttttattctgtccttatcatatttcaaagggtgctacaccccttatcctgctttaatattcaatttttcaactgtaattaattcattatcaatatttgtggtaaaacaatcttccgttctcatgatatccatgtttatgtatgtgaaaatcttcagcttatcatgcttattcccacgattcttaaatacatggacaacaaagttaggcatcttgtatccaaacccattcttcattatgtctgcagcagcttccttctcttttttgcttaatggaagaataatcatcgctacgtcagttttatctgcaattgccttacttcctcttaaataattagcatcaatttgcagaccttttagccaagcgtccttccattcaccgttcaactgcgttgcactcatcataaaaacatcatatttattacatagggcctttaacttatctgccatgagcaataaaatttggtcttctcttaagcttattccactgtttctactcatttctgaaaaaatggttacagaggaatggatataatcaaaataaatatacccaacattgtattttctaacgtttttctcgatagtctcttctatttctttgatattgaaatccggcaaatgttcaaaccaaataggtgattcctctaatatatctgccgcctttctaattctttcttcttcagactctgtagtggaattttgaagtattttctcttctggtacacctgagatatacgctattgctatactttgcagttcctcaggtaccatttccgttgaaattacagatgcgttctctctaaaaaggttatcttcccattgtttttctttgatattgtaaatttgggttgcgcctaagaagcaggcatctgcaaccatgtttcttgtcttacctcctccagtggtacccgatctcaaatagaactttttccttcgagatcccctaaaaatagaagtttgaatttcactgttcaaaggtactccaatatctggtgagagctttaacctatctaaaaactgatgagcaccctctccagcttgaatacccttgctttgactgtttgttttgaatttatcttttacttcaataatcttcatttcataatgggaaagtatttcttctattgacttcttatcaaagcgttcctgcatagcttcttgctctctaggatcaattattgtatgatcgtatatttctctaacgtcaaaccctagtccatgcatttccctaattaaactaaacttttttaaacggttataataatactcaaagttttcgacttcggccaaattctgtattgtatgaatataatttataccgtcattgtcattgaaaactttatactgaattccatagttttttagatatccatcaatctctacttcattaataacctctgtgccttgattaaataagttacacattgcagcaaagagaattgaatgaaatctttcgggaaagtcggcctttgataggttgtatccgttactttcagataagagcgagggttcctttaatatgctccccaacacttgtataattgcttttttgtcttgtagcaaatggactctccttcctataatgttgagatgtcaacaagtccccttttctttcgcaatcccttttttataattaaagtgatttcttctcttttgtgattctttgggtcttcagctgatttttgtattgccttttgttttatgtaatgtcgcttggcctcgtcatatacaaaagggacaattccaatgccatcaccttctcttggatgattcgccagtgtttcataaaagtacttaagcgcaagctcgattccttttagcttataaccataatcctcttgaaactctttgatctgttttagcatcatacctgtcggagatgcaagaccatataagttgcatatgtattgaagtaactcttttcgatggtctgcctcttgtctccacgtgttgaagcactgttcatggtagtatctttttttataaggaatcgctaaatctttatctaatttagtctcacaatatggacatttgacttgtcttcccaaataatcacccctattaaggaggagggaacaatccccccagtttatttagatagaagatcttttaggtcatccaaaattacagacataacgtttacttgtttgcggctgcattcagtcacttttactcccttgcctaaatgtttctctgtaatctgattaacctcttctagtcgtccttcttcattgagcttaattccaacttctttaatttgctccatcaaagagtcataatcaagctcatctgaagcattgttttgtttttgctcttcatatgtaacagcaacaataccttctgcttcttcctgtctttcgactgcctcgataatggccttctccaggttctctgcagtgaactcaggaaggtatgtatcaatgtaatcgaaacggctgcgtgcaaagtgctcatctgtttcagccaaccaagcacttgatttgataacctttctgtcttcatcaacaccattagaacttagataaagtacaatatcactgttatcaataacaggggccaatacacgtttatcacccttaggataaacctttccttttttgtcctctgcagcatgagcaataaagattacggtaaaccctacaccaattaatttattgatttcttcccaaacttctgtttcatactctttccaaagaccaaacccatcgtttccatctttaatccgttctacatcatattgctcacaaacatatctggttgcatatttagcaaatgcatctacttcatcaacaataattgtctgatacgtttcttttgccttttctgcatttttggttaactgtttattaaccttcttaaaatccgcccagctattaatagccataaatttaacgcctgcgatggcattcaaacctttttcaaatggcaagtataaaggcttcttcattcgtgtgctttgttttgtcttacccaagttgttagaaccatagattgtaattacttttccttctaaaccttttgcgactactgaaacttgaggattgaaaatatcgattgccatttaagctctcctttaattatgatttggggtgagtcgaagcacaccccgagttatgtattttcagttaagttattttatttttacccattaaaaagggaggtcatcatctgaaatttcaaccggctttgaaggcttgttattaggagcgcttccgccaaacccagacttattattattctcattgccaccttcattcttaagctcatctaggtaaatctctctttcagtcagcgcttttttaattgcatctgcattaaaagcattcttgctatcctcgtcatatggatcattgccacctgtaattaggtactctcttttcgaattaatagtgatttctttcttgtcttcgccaaatgctgctgttttggtcgttactttttgctctttaaagttaataatttttccaaaaacgttaaccgtagaccctttttcataattattttcaacgtattgagacccttcttttgtgactacaaattcaaacggaattactttcccaccatataaaggaatataaccatttaaattaactctgcccgtttcttcaccttttactttttcttcggttacattctttacaaacagctcaacatcaaattctgctcttggattgaattcttcattggcgtccagtctatttacaaagttagtcgttaactgtggatacgcctttaaaatcccttgagagtaatattcattcaatccaatctttccttgggtaattctcactttgtcagcttcatctctcccatgttctgcaatggacttatattcactgataatggtttgataaccttttgcaatagcattatctgtgccatcagctttcttatattttgaaaagccttttactgtatgcacttcatttggtgcaacctcaatatctagttcaatatttagccctttaccacttttccactcagtgtgttttacctcagcaagtatcccctcaatagttacaacatttgatgcttcacgtaatactgttttattttctgccatgtaaataatcaacctctttcttttaattgttaattttatttttattcttaaaatgcctataatgagacttgctactaaacttacaatccttgataccaagtagcttatttaattctatgtatctcttttttggaaagtcccaaggttcaggatcaccttttacattttcaatccttattactgttccatgccggattgtgatctttaggtttccatatgagtatgttttagaaaaaagtcctctcttaattcctcttggtttaaattcctttaccaacatcacattcctggttaattttcttcttgcttggtcttcgtcaatgtcgtaattcctttttacatcatttttgtaggtatgtaaggctactgcagatactttcagtatctttaattcctttttcatcactttcctcctttctctctttgggataacttaatcttacatcaccaaaacgaattggtcaataactattttatttttattctaaaaagttttaaaaagagttgagctgcagataacagctcgacagagtgcttaactttagctgggaaagttgttaacccttttaaggtggttatccatatgttttaatatatgaagtttttcattaaaattcatatattcttctttagtaattttctttgctaattgatattgacgtgaatctaattgaactttatgtccgagtttatctttaataattacgtgtttaacattaaaaatcttgtatacttcataaaaggagttcatatctagatcatcatatttgtttgcaccattgccactttctttaattctgttaccatcattgtctatacgtcgtgtatcgattggcttcacaaaatcacccaatcgaggtcttctattaagagtttgaaagtaaaccgattcaccgtgctcgttttttgctgttaagaagttcatttgcttctcctttatcgacgatattttttagaatacctcataaaagaagagccgcttaaatagcaactcaaaatgtttatcttattagcctcccactctaacttccataactcagcctccaatagaccttatctgtatatcagagcgcttaaagaaggctatgtggttgatcagccaattgaatttaatgaagcaattgtgcggttctatgatggtgaagaacttgctgtgatccataagactactgggaagagatacaatgtgaatgttaaaatgaaaaaacttcctgacggttttacgctgcagacaatgaacatgtggtcttggagtgaggttatttgattattcaaactcctttgtaaatggtataattgaattaataaaggagtggtattatgttcatcaatcaatcgttcagcagaccaaggatatggcgtttatttagagaatacaaacaaggtacgtctcgtaagaaacgatgtgcgcggaattggtggcaagttattatcccacccatattgcacagataaagcaaagaatacaaccttaatttataacacatatgacagtggaacgctgaagactgcagaaggagatattgtggtctaaataaaactgtagttttaacaagtttaggagatggatatatggccaatattttaaccaaagaacaagatgaagcaatccggtatttcaagaacaagctgaacatatctgaaaaactgtacatatccctgattaattttaatctgcttagagataaacacgaagactttggtaataaattatatgagctttataagacagacatgatctcattatcctttaatatatgttctgaaccgccagtcagttggatggctatcaatgatttacagaaataaatctgattttcactaatttggcaactatatttatcaggagtgcctttaattgcaacattcctaggctcatgaatttcatttcgatgtagtgagacagaagagtctttatcccaaaagatgccgtacccacttccacttaacaacaagtcatttccctttaaacgaactgactgagacctttcgcaataaattccaccatatacattagcaaactcattattaacgagactgactcggctagagtccattatctttgcagcatatgatgagctcgttccttttcctttggtattcacaaccttaatatcatttgagttcctaacctggacttggacacaatcactgttttctatcctgttgtccgtaattaaaaagtcctctgcttgatgtgttgcaatagggcatgcttttattttttcaaaagtattatttgatactgtgccaccctttcctcttacacaaatgcccacttcaaagccactaatcgtattgccatcaatttgaactctgtttccagactcagtacttgaaacacctaccgaatcaatcccatatgtcttaatttccttttcattgatgatcttgttatttttgatactgacatccgtgctatatccataggaaataacatggtcgctgtagtttccttcaataattaccttgccgcttgtgtgagctgtaacggatccacgtccattatttttaaacctgcagtttcgcacagttaatttataggggtgatcgtatttaattccgttttctccaaagccctctaaatcaattcctaattgtggcccaattgtatctcccccagcttcttctatatcacagtcatcgacaagaagaccttcacaaccattggtagccagattatttcttcttcctcttaaaagcgtacactttcgaacggttacattctttgagggcgtatatgttcctgaagtgttcatcattccatcagccgctatccaaatgttgtctccaatacagtcagaaacttgtacattttcaattagcacattgctacttccattaacatggataccaaagccccattcatgcgtcttcttaattgaggtaatttttgaataatcatgctcatgtcgatccccaataatttgaccgccacgaatcgtaacattacttgcttggccgatataaaaacaggagtaaccctgataatcatttggctgcactttaaatatagcctctggatgaagtattagctcaatattcgaaggaacattgatacctccaccgaattcaggtaaccgctttgacgtattcactgcatcaattaggtagataccttttggaacatatactttatagaatgattttgagcatgcatactctaaagctcggtttaatccttctgttgtttcaattgcatttgaccctttatcatcaattccccaatccagagcatcaacaaaatagtataagggctgttgcatgttcatgttgtcaaacccttcccttctacattttcattgagaaaccctgatagagtgtcaatgaagttataaaaagtctcatttcttgtaccagagcgtcctttcagagaaaaggtgttgaacattgatttgcgtagtccagtgctcaattccagttgaatgctctttcctgttttatttttattggccacgttatttggactgctaccggatagcctcgtaccctcatctagaagctctgcagggtagccggcattatttaatgtacttgttatcgcttcagctttgtcccggtctgtgccgccaactaaaacatgttgatcattacttgcgtagccgtgaagtgacagtgtgaactcatgttccttcaacatttcaagtgcttgtggttcatcaaaattcgtactggttaaatgcaaatcaaaggctcctggtgtctttaaagcttcaaaaagatatgtagagtatgtttcgcttaattccttagcaagctcgcttgttcccccttctatgccacctccatggggagcaagaattaatacatccgtgtcttgctcttttgaaaatacgctaaaattgaacggtgattcattcgctttaagctcttcaaagttccgatacttgtcctctgctaaaatactcactggattcaggaatgagaccagagctgtcaccaagaatggaaaagtcttcttaactatgttatactttaatagcttcacttcgcggtgaggtgggcagattagagtgtaccatccaaagtctctcttctctgctcctttagtcttttttagcaattccactattctgtttttaatcttcaattaaataaacactccttttatttttataaacttcagatagctgaaataaattacatctcaatcacctccttttaagttaaaaatcacttttgacgcacgcaatctcaaaattttgttttaaatttattgcatactacaccatagtatttaaaatattgctgatgattagctttttccaataaagttatgaactcatctccatgttgttttctcgctgaggaatgtcttaggtcgacaatgtttatttcttgtgcttttacactatgaataaactgttttacttgattaatcaatcttttgggaactgttccgtcttcaatcatcaattcaagctctatcaaagtacgatttgttctatctatattgcttcactccattcctctataaaatatcgtttttatttagactctataagctcagaatcttcgtaaatgttgccgatgacttctaaatcaacatgagctacaaatacagtagtcaagcctcgctttattcgcttgaatctaaaacctggcacctcttttgtccaatagatcccgtctgaagcatgttcagccacttcttcctgccataaaacttctaatagctcatttgaattatcacggtggttccttacaatgtctccctcataaatctcccggccgtttttgtcctttaatccggtgtattgtcgaaccgatttcaaacttttatcagcaaacgaaaattcatcaccgtctttatctgtaacgtaatctatttttccgttatcaaaagaaatgtcatgaacatcaataatttcttcgtaactgtctatacctgcccaatgcatattagaacccaaattgcttaatgcatgtttaactaccaacgcctgaaatttaatatctctcattctctccacctcctgttattgtctccactcaaaaccgatattaacgtttgcttgtttaggtctgataacttcaactgtgctacctctgttagacagcctactttttaattccttcatatccttgtatggcgctatttgcaaggtgctcagatcgataagaataacttcatgtttatctttagcggcatactctctgtctagtgttctaacaatgtatacatcagcatcatctattttaatgaagtacccgtcctctaaatctttcacctttggcttatctgctttgttctttctaatctttaaattgatcgccattattctcacatccacttattttatttttatcaaataaatcaattatgtaggcttcgtacatctcatcccaataaggatctgttcttgctatgtatttctttactcttccattctccacaatcttaaaggtttgccccttttcaatatccgtgaacttcttctttgtccatatccctctgatcaacactacaacttcttttacctcaactgtttgccgctgcatcacattcctcctttttgattttcgtgtatcaagcctgtacaatattcaaaaaccctaaaggatgatgaacatgtgcggcaggttcactttattctctgagtttgacgacattatcgaacagttcaatatagatcaatttttgtctgaaaacgaataccatccaagctataacgttgctccttcacaaaacatcctgacaatcattaatgatggatcaaacaaccgtatgggtaagcttagatggggtcttatccctccttgggccaaagatgaaaagatcggctataaaatgatcaatgctcgagctgagacattggccgagaaacccagctttcgaaagccactcgtaagcaaacgttgcatcatccctgcggacagtttttatgaatggaaacgactcgatccgaagactaagattcctatgcggattaagcttaaatcatccaatctctttgcatttgccggcttatatgaaaagtggaatacgctagaaggcaatccgctatacacctgcacaatcattactacaaagcccaatgagcttatggaggacatacatgatcgtatgccggttatccttactgatgagaacgaaaaggaatggctaaaccccaaaaacaccgatcctgattatcttcaaagcttactgcttccgtatgatgctgatgacatggaagcttatcaagtttcatccttagttaactcgcctaaaaacaactcaccggagctcattgaatcccattaagtaccacagtcattttgctttatatatcaccttcgcttagctattatgttctaagtaggaggtgatattttgtttgtatcgccaatgttattgcattcaatcaaagaaccatttgatgacgatgattatattaccgagctgaagtttgatggaattagactgatcctctccaagtttaatgatcagataaagctttatactcgtcacaacaatgaagtaacaagcaagttcccagaactgttggatattgatatacccaatggaactgttttagacggtgaaatcattgtagctgccccaggcggtgctcctgattttgaagctgtaatggaacgctttatgtctaagaaatcagctcataaggtggtttattgtgtattcgatgtaatctatattgacgggtattcaatcgctaataagccgctcactgaacgtaagagcatgcttttagacctaaaccttgaccacgaaaatgtctttgtaattgaaggcctgcaaggaaacggattagcttactttaatctggccaaagaaaagaatcttgaaggaatcgtactaaagaaagctaactccccttatgaaatcaataaacgttcccatagctggctgaaagtgattaattatgattacacagatgtgcttatcactggctacaccaaagaggatataaagtttcttctgtcttatcctgatggtacaacagctggatttatggaattcatgccgaatgcggaacgaagtaagttccactctatgaaacaagtaaagtctgaatctgatgaatatgtatttgtagaaccgatcttatgtaaggttaaacacagatttaagactaagcatggcaaactccgtataccttcctttgaatcctggagagtctaacctctccgttacataattccttaatgtctctttcttaacaaaattcaaaatctattacattaacactttaagttagttctattccatctcaatccacttataatatttccctatatgacaatcaaagcgccaaccatcctcaatgactttcgtatgactattcttatatttcgagtgatttaataacaccctaggagaaaacattattctctgccaattaaataattctttcatttttcatacccctttccttgtgaattttcacttttgataacaatgttatctttacagttcgttcaattaaatattctgcattgcagtaatcgcattttactctaaattcaagagatggctcataaacaatggtttctccacaaatctcacaaggaaaaacatcttcattgattctccccataaataaatcacatcctttaaaataactattttattttgatcccataataatcaccaaatattttagcccacaaaatcatttagaatattctcattcattctcctccatctccatatccgctatgagaactacttccgaataacccgagggaaacgactaatgctgttataaacgacgacaatataaggggaagcaaaaatactgccaagccggtatagttagactcaaacgttataagctgtgtgatcgaatatgcgaaaaagaaaacatacaatccatatataatccaaaaccgcatttattcactctccaatcgttttaatgcttcactgttttcgccaatagtttcgttaatcaataatctgcgagctttctttatcgtagttatttggaatgtgcaatcgtctcttccatacatctcacaggtaacaacataatctctaaatagatcgttcatatactccatgtcaccacaaccatatagtttgccgtttagaaagcacgcatatatttgcgccattgactttcctccatatcacctatggctatcaccgccatttgattgtgtttctgtcatttattccatctcaatttttttgaattcttttttgatttttctattgcttttcactcttttattaatagaggcgttgtcttacccatgccatctaaaagagaaaggacatttttgtctcggaggtgaaaggtaatgaaatttctaatggatcttttcacaaattggacttttgataaagtcatggattacatgctagctgctgtaatttggtttgtattcaagtccaaatcaaagcagaatgagtatcctgataactttaaggaaagaaggcgttatagagattgatattctctctatgatcgttatctatatggttactgctttagatagcgatcttctagtggtttaatttaaattcaacacccaaaaagtcacatagctcttccttaaaatccggttctccaaatgttccattcaacaatctgtgttctaaaacattgagagtaacctcttcaggttcccactgatcttctaaaccgtggcatgaacagtgggaaccattaacctcgaacaatttccctctctcttcaaatagaacccatgcgtgcccttcacaaatgtcaccatcataagaggcaaacagaatgtttacatcagtttctttttcttcaaagtctgacaaaacgtcaaccttttcttttccttcccaatcgttcagaagtactgatttttgcttaatgatttcttcaaattttttcattgtccctaactcccccatttcattttaaaaactatcttttatttagaccttctcataagtctgatgaaatatgtcaggtttacaaggataaaactcaccttggactcctttaataacaaaatcattaggcgaaacgatcatactgccttctaaagtttgtatatgacgcattgttgtaagtaaatcatgccagataccaactacatcaccgcagaattcccgtaattcatcataagaatcttgtgatccgtcatattggatagcatcaacttcaactggttttttatatttcacttcccacctcttcctttaaaatcacgattttatgtagactaaacctttttcttgctgtcatgcgttcacacttttgggtaagatactaatctgttaacattaataactcatcaactttataattgtattcaccgtattcacccgagctccatttaacacctacagagccttgatttgtcacccacaatataattcccatttccccattttcatgccatcttacttgctgccctttctgataaccaagcatgtttccacccctttcttaaaaagcattttaatttaactttaatgtgtattgccttgagaaaatcccctttaattggtaaactcatacctaacttacatacgagtgggtgattccttgaataaaacaatcggtattactggattaatcatcagcatagtagtacaatcattttcggccgatgattcgctaacccaaaagattgctacgggtttgttatttgtatcaataattatctataattttgaacatgctaaagattattctataaagtcacttgtaattttaggtgtttcctttattgtttttatgctagggatttataaaatcctctctattaccagcgattactttgaaaagcttaatgtgaattttggatacatcctcttatttgaaatagcattgattattgcattagtgtcgattgcagtaaacgtaatgaagtacattgcgaatcggttaaagaaatcacctgatggtaaagagctttgactctttgccgtttttaagctaaatacttcttcttatgtggtcttctatgtatgaaatcaaatgcgatatcaacttttgccggttccttctcctctgctactcgttccgtaacaacaatcagttgcccattttcctggtgttcaatgctatgaactgaatacccttttgaagcgtaatattcaccaataatctcatcaacgtggttgctaagcagattcctttttatcaccctcataacctccacttattttatttttatcctttaaatatttatatgtattccatccacagccatcaaatatgcttatatccgctccaagatgccatttaaaccaaactaagttaaaccaggctgtatcaactatgtacttgaggtaatcgataccctttgccctccattcttttatgcaaaattatataattctttaatcgttcatttgcaatatcacaatactctttactaatttctgttcctatgtatttacggttatttaaagctgccatctttgcagttgttccacttcccataaacggatcaaatactatgtctccttcatttgaccaagagagaatgtgatcttcagcaagcttttctggaaatattgccggatgttgaaaagcgatcttgtctagtgttgatttttgatgaccgttcggtatcctccaaatgttgaacctcacaccgaactcctttagtaagttctgtttatgatgtcgtactttttcgccgtccatttttctgtaatgtccttttatgtgtttcttgccgttgtaccatttatttttcctgtctgctaatagattgattgtttttggcttgcctttcgaaaaaataaacatatactcaaaaatctgataatatctattcttatctggaaagctgatactgtctttttcataaatcattgtgtcatgtaggttaaagcccaactctttaaagtataaagcttgtctaaaacttgaccctgtctcggaacctttatgtgttttatcccctactacccaaacaacgactccgccctcttttgtcaccctatacaattcttgagcagtttcctcaaagttaaatgaatatccattgtaattccttaggtcatcataaggaggagaagtcactgttaagtcgatagtgcaatcaccaatattctctttcatgaattgtacgcaatcattattatgtattttgtttagttccaataaataccctcctttagttttcagatgaaataatccttttacacaaatattaatgtaggctccttgtcctcttcatatcgttcgtatccaataaaataatgatcgtagtccttttgaatatatgatgaaatccagtcgatgaatttttcaatctcatcatcgtagttttttaaattacatctaatacttacataacaaccaccaacagcgtcattttcaattttgctatgggttttcccatcgaaataataactatctgattgaagcatccatttccatctagtatcttcagaaaacagattatgttctggcaactcacttggatgttcatctctttgaccagtcataaactctaaaatttcaattattgatcttggtgtttcctcaataagcttaaaagcacaaaccaattcagtatacattcccattaatatatctccctctctttaaaacagtctttttattgaaaatatttatctgatgtgcgggccatgtcttccccgcctaaatagttttttatttcatttaagctataaatgaccttatcgaatttatccctaatgtgcggtgcatattcaactgatgaatcagacatccctaattcctttagatttgtgtctaattctttaaagtaaccttgtaactttacgttcactgaaaactctcctttttttgttattatttaatctcaacaattagactgtctggaaaattcttcacatcaagtgcatttacatgacagtagcctacatagccttctttatctacatacttataaaagaagttttccccattattgatgatgactttaccatgatgtgtatactccatctctgaccccttataccaaatcactttaacttcagttcctggtttgattttatctaggtcaaatattgttatttcttttaacaaacgacaacctcctatatattttattccttctccccagaaagctccttgattaacatctgtccaagctcatcactgatatatctccagtcagccccttcaggcgttctaataccaagagaaaaaccgccacacaaggtatcttcagccaaccttaaaactccatcatttgttttaagcagctcatgtttaaccatccctttaatcatttctcctcttcctctctctttaaaattttacttttatccaaactgctttctccaagggacgttgcccacaacactgtgatcaagcatttcttcgcaacttttacacagggttgattttgttattgtcatatggaaggagtcccacttaccacaacagtgacacgtattctcaaatgctgctgattccttctgtttttttctttcagagccgttgccagttaacaataggccgttactataaaggtcgttctgtcttacttctgcttctacactccatgggtatattcgcttctttaagtgcctttgcactaacgactcgcttcggctatttccaatcttcatgaactctctatttgcagtaaggtcaactgttcttttcatcacttcggccttttgaacagctttttaaaccaattttctttttcattaaccattacaaatccgggattattcatcctaaacccatttcctgtcttgtccatgttgtttaactgcttcttcaattgctcaatatcttggggtgtattgatggtcattgcaatatttgattcttttacttcctgcactttggaaatcatcttatctaaagtgagatcacattactcatcttcgcagtcgcctatgaaataaaaacgttcaattaaagtaccactcgactcatcttgaaaagtgccgaataaaattggatccttatctctccgttcttttttgatctgcctttcaaccttccccgtataatctgtaaacaccacataaaaccgatccaatttgtctttcactttgttgtatttaatgattacatcatcagggatttcacgttcgtaattttcaagctcaataattttgacagtatcttttgcaatgttatctatgtattcttcaatgtcatatcgataaacaaacgtatcaatgccaagctttacaatctcgcgttctttttcaattgattctaagtggaatatcagtttctttgcagctttaatttgattagtttgcttatacttattgagtaaccagcaattgtcgtaatatctttgaagttctttgtctgtaaccttatttttctttgatttaatcatgtcaaaatattgatttggttgtaaaacttccatcttttcactcctttacttaatctaattccctcatgtcctcccgctgctcaatataacttttaaagtcctcccattccctatcgatttctttaatattcctagcaatatagctttctgcaatgtctggatcaaccaacttttgaagagacagctgatacataaattcaatctttgacactgtttctagaaatgactgggcataactttttgctctatttaagcgatattgactcattccatgttttgattccattattattctcactccttttaatcacattaaaatgcatcttttaatcacttctttgcagcatagctctcaaagaattcttcaactgatcttagataacggtatttatttggatcttctggatttctgaatcttttcgatagcaccaatgaccaattaaacatcaatggggaaaaccttgcccatttgctaaagcttaactgaaggcctttccattctctccccgctaattctgctaattctagaatttgatcttcttttagattcacttcctcttcaaacatcacttgaatttcttcgtatggcttatgcccaaaacaacaatgacgtgttttcaaaccaaacttgaaatttaagatatcaattaaattaatcatttgtgtatcaagttcatcatatggtataccatttgcaatgaatttttctctttgatttgatttcacattattccttaataacaggttagacctcttactcattccgcgccctcccaatgtccatgccttctcatgatgtccgttacctcatcgatatagggttcatcccggttgataacgacataatcattaagtgctttcccttcggtttctctacacaaattgatcctgtcaatgaatatcccaagaaaaagttgttcctcaaaagttaaatgatctttgacgtcatccattttcaaaacgatgaacttactcattctgaatcacctacaatctgtagatttttatagtgagctacatgtccgcaggggttctcccaaatatgaacttgtccgaagaatccgtcctcagcgtgttgcatcagctgtggattccccatttcctcgccacaagtaggacattcccaaagtgcgttcatttctttaaacccgatcatgaaacctttggaatcgcgggcgggaatcgttacttttttttgcattcattccccatcaccttcccatgtagcaggaaactgaccgtttaagaccttacttaccactccgaaaggatcgtcctctttatcggtgaatgtagcaagcaaccttctgaaattgtcattctcgtatttaagtcgctgaatctcttcctgagcctgccgaaactgaatgaccgtgacttcctgctggcgcttgtgttcctcaatagtagcctgctgctttttcataaaaccgatcattatgtctttgacataactttgctcgatgatgtaacaaggccctgcgtttaaatcaaatggcttcaactcttcttcagaagctaaatgccacaatgacaagtcacatataatttcctttaatttatccatgctcttcctccttatttcaatctcaataaaacttacattttatttttattcttaaaataaccgtgctgatttacaacatctccaagtatgtattgtatttcctctaaattgtctttaacgaaatctagatctccaattgccattctgatttcattattctctatgctgcgtaaagacctttcacatgatactaagagctttgtatatttccttaaaaccatagttcttatttgatcgttaattggttcattaatcaataattaaagctatctcctttcctgattctaatttgattatataacctcaaccatatgttgtaaatacttattttatttttactctaaataattttaaaaagatcagctttactcatactgtaaagctgctgtcttcataaacgtcttcatgccgtccagtttccaaagagtttcatttattttatctctaaattctaaaactgaagcatgatccattctaatcctcaaacaatccccattgtttttaaagataatgtctatgtagtactctccactttgtatgttcttagaaccaacactcatggaaactgatctcataatgtctttcaagtcaatttcaagattaaaatccattgtatgctccagtctgactaaaaagtcaccaattttttatgtctcatgatgactggcaagatgtgtatgtgagtttattttattgataacagttgagaagatttatagccatcattttcaaacgaatcgtctatttcttcggcataagaggttgttatttcagcatcctctgtacacatgatgtctacatcaaatagtgcctcatatttttcttgatctttttgaagaaaccccattttccctgttttatttcttaatttctttttaattgattgatatgcgaacaaaagtgcttcctcttcattcttggcttttattctgccgaaaaaaggaatgcacagctccccttgaatgaaataatccttttctgacatacgtttccctctctctggtagcaattaaccgaacttacgttccctttttgttaacttaattataaccttttacctagttagtggcaaatcttttttctttcatttaaaaacttggaaagaattgatatagtatgataagcaatactataacaggaggttgtccgatgcttgaggttgaaatcggacaatgtttgatttccattctcctcgaaagtaaaggaatgtcattaggagaactttcaaagcgaacaggcattagtacgcaaagattaagtgactatgcaaacggctttagaccttctatgaatataaaaacagcgaaaatcattgctattgcccttaactgttcaattgaagatctctatgaatggaaaatcaaacattgactttatcgctagggagtttggcctagcgaacctccttgtaccctttttagggtatagaactattttactgcatatgtacaaatttgtctctgtctaactttgtcgaattctgaaaaatgtgaacaaaatcctgatatttttcgaaaaaatatcacgagtttatccgcacgtgttttatttttactctaaaagttatgtaaagataatccctgcaacagggattaagaattattctcaattacttcagacttgatacaatatttttctaagttatccatattcactactttcctcagtgattgtgaattaaactccgcgtcttcattcagaaacccgtattgtcgagttatttttttataatcaggtacttttaattcacccttctctttgtatatctcatacgccatgttgagctttcctgagttgatgagattcttgggtgaaaagaagggttcttctaaaaatttttgaaactgactaaaagatcggtgaactaaaaatttatcagctttcatactctgattagaactcttatattttagcctaaaaatgttttcgcttttaactaatgtagcaaatttgtttttaagtccactctctggcgaaccattgctaagatgatatgttgtttgatcattagcgcgcttaagcaactcataacatttatcgcttacagtaattattcttacaccatgtttatcatctaccagctttaccttgttatcatcaagtaaatcgtcacctgttaaattcagtaactctgaatgctgataaccatctataccttcataaatagcctgtatcatcgctttatcctgatcattaaccataaaatcaacatattcttctacttctttattggtgaatagtgtttttttgtttttatctataaactgctttaagtcaccatcctgtatctgatacactttgttgatgttactgtttgccaagccattttccattgcccatgttgtgtattgtccaattacagctcttgctcctcttagtgaatctatagatttactatctaaatctaaaaataacgtacgcagctcttccaaagaaaaattaaatatgtctttttgaagtattttttctgtagctgagaaatcccttagccttagccaatagtggtttcttgttgcttcactttcgtatttctctaaaaacttttccttcaattcagcattatacatttcactcatattaaattctcctttaggctttaaacaacagcaatttcatcataaaatattcgcttaagtttcttcttcataacattctttagttgattttcattattttgtcttcctaattcttcaaacactcttccgcttttactaaagtcaatcgtattaaggatattttcaagcttgtttagttctacattgttttccttcatcttcttggccaaataaacataaccgtaaaacattacgttatggttaatgtatgattgctttctaatggacgataaatcatcttcaagaaattcatctgggaaggcataaaaaaggttatcgaaaaagtctaccaagtatttcgcaattttcaacgcatcttttcgagatttcaactcaaatgcatcgtctatagcttccgataaagtataatatgtcacaagaaaattgctatcgataccaatttcactttgtgggcttattttatttttaagttcacttttaaatttcagctgctcgacaacggttgaagaataccgtttttgtcccaattcttcaattctggatttttcaactgggtttatggtattcatttgagcaaagtgaaccttagccttttcttcatcgtaattgagcacatttaaaatgaatggttgatctaattcagggacttcagcaatggccttaacaatacctgaaattcgatgatatccatcaagagcatctaataaggttcctcgtgttacagtgagggattggtcgcttggatcatattcaacttcttcatcaccatcagatgttccaagacgagcgttaaaagttaacattgatacaattaaatcgcctttaataaacaattctttgatctcatcaactgatttagggtttgttttaggtacaggaataaggctacccttaatgtactttccttcacgctgagtgttgtaattgtactgcaggatggagctattatataactcactcagttctttggcagtaatggaagtgacatagttatcctctttaattttaatcacatttttaaacttgtatgggagcttaactacttcttcaccggcgaataccctcccaccttcaagctcttttgccaatctggttggaaaataatttgacggatctaaggcttgcgtcccaagaattgaatacatctcttttgaaacaatgtacacttctttttcgtttaaacgctgtacgttgttatcattattatttaaaatttcttggatataaccagggagtgccttgtatttgtccgccattgtggcttttaattccttcaccatattgggatcatttttaatatcattaagattttcctctatttcagtttttaacttataaagtttatccgttgtcaacaaaacttcagacacattatcacctcacataatcatattaaatttatcattattttcataagcaagtaaagcttttatatgattatttgtatcacttgttcaaaaacattttaagtttattctgtatatacatgtctgattttaaaaagaattctttatattgctctaaggtaacttcatctaaaaaggacatatcttctttttgatcaaccaaaacccctggatcttgagaataatccctttcattgtttaaataatgatcattcaaaacattgatattgctgtgaccagagaaagctgccacttttttaatatcaccattaacgctgtaagaaaagtttgttgcagtattgcgtaaactatgcggagttatctttctttctttgggaatacccataactctacatacgcgattccacatatcctgtattgaatcaactgttaacttatgaaataacagttcatgttccccatactcttgctttaacagcaacaactcttcataaaaagctgtggaaattccaactggcctagcctttttttgcttagtttttttaaagttgacgagataacattggtgcttttctgaataagtaatatcatcccacccaactctaagcacctctgatttacgccctccagtgcgtgcactaaacaaaataaacatctttttcattaatctgttctgacgctcagtagcatacgctacctcagcaaattcatcagcttcagatattccttcaaaagaacctgctgggttcttttctgttggaagaggcctaaaattaaatacagatgcatcacactcatgttcagattcaaggtacttaatcatacttttcagtgctgcaatcttattgttaattgttgaattggagttgcttttatttttagccaaatgggttcgataatcatacaggtcgcttttcttgatcgccaggtcactctcagttaaatattcaatatccttggcagcataatggttgaaaaactctcttatatgcctttcatacgtggctctagtattagacttttcaatttctccagtttctcgatccctgtttcttaaatctaattcatcaaaccacctatttatgttattgtatattgaataatcccttagtgttgacgctttcttttgagctcccataatgacacctcatatcatttttttcattaagtattgatcaaattcttgccatgcaacaatccattcattttcaccttgaatattactcagtagcattatattggcgttacagatttccatttgctttagcatgtcgtattctttaagagcgttaattaagatgtctgtattcattttatcacacctaatttatttttattctataataaaatttagtttaggacatttaccctttcgtccttacagacgtttataattggcatccccgttaattcctcataaagctcctcttcgaatccaacccattcatcacttgtcgcttctcttcgtaggaactcattataagctactgctatctcaggctgctctaaaaactttaaaacgatcatatgctttttccaaactttagccttgttttcttctgtataatatttattattcattttatttttactccttaaatacattttattgaattcttttgttctttaatgaggttatattctttatgattttttctcattgtagttacattattaggtgtaaacacatctggatcctctaggtggagattgactcgtgtgaagttctttagttgttttatgtattgatattgtcttaatgatgtaatcttcaactcttccttttgagtggcacttgttgtttccattgtttcatctcccaacaacgttcatcttgtaacttcattatatatgttcccacaataatatgcaataattattttatttttactcacgacaaataacacatgccctttgtatgtgttaaaatgtctgctagtttgtctttaatcctcattaggatacctttgctttatattttgatctaatcatttctgcttcattttcaagatgattgtcttcctgggaaattacaagattaatagctgccatttcttcgtaacctttggccatatcctcataagaaagtgattgtccgaaatgctttttcattttaattcctccatgttcttgttttttatattatgaatttctggaacattctcttaaaattagaaaagacgcctgatccactggatcaaacgtctaaccattgattatgtagtatcctgttgtattattaagctccccgaattgcacttgctacagagatctcatcagaagctgatgccgtattaactgaatgttgacctgcaatgaatgaaattgctaatgctgctaaaatggctgtaccgaaaataattttcttcattaaattcacctcctttcaagtgctaaattctaaattaaatttagtagctccggatcacagcctaatttttcgagttctattatagtcaattggataaaatatttatcatctgattttttgaaatatgttattgatttataaaaatcagatttttgttttgatatcaaacctttataataaaaataaaatcctaattcattttcatcttgatccctatttgataagctttccaataattcgttagccttgtcgagattattattttttatgtaataaaaagccctaagctgctgatatttgatatcatctgattcatagttaacccatggattttccttgttccatacgttagctaggaagcaaagagcgccgtttagcatttctttatgggtatcattaagaacatacttctttgcctcaatatacgccagcatagcttcttcatagttttcgaaaattagggtatttcctatagtcagatgcgcaaaaaaacatattcggttcacattggactgcattattgcaatatttgaatgtttcctcgcttcgattaaattgttttcatttaagcttatattcgcttgtaacattgacactctacttttgtacgaatcttttataaatccttctggcaagctgctaaaatctaaaagtgttaaggtgcttttcatcaatccaaactcaccaatattcaagtatttatacatcagcattgcatctgagaaaaatgacatttctggggctttgcatcttccgcactctcttattgcttctggtattgagatttcgtttttataaagctttctatgtatgctgtagatgttgccccattcttgacttgtggtgttttttgagttgcttaaatttaaaataatcttgtctgttaacgtatcccattgattaatatctgagtattcaacagactgtcttgcgctttttttattgggatccagtgataagaagtaatcacttagaagctgctcttcattatcaggaaacaagcttttaacaatattaattaaaccgcctaagttgtccatttctttctctggggtgttgatgaatttgtaaaaaccattaaccttttcgtaccctgctatttttgagagtttcgctgcgagctggttgtctttttcacattcattcttaatcatctgcttaagattcattggttactccaccccttcccaactaatgttctcttgtttataatatacattagagttgtcagaattacaagtatttattttatttttattctaattattttttaaggaatacttatctgtttgaaattcgtattttatttaaaaaaagggggatcgcccccgacttttatttgtccagaataatttttgcttgtgaaaatttttggtttaaattcctgttttctttcatactatttaaaatgatttcttcatccaatcctatctttttcaggattaaaaatgttaatagtccattcattcttaaggaggcgtaatatttctcaactgctcgatggaaaaccttagttttgtttgttagatcatagtgagtaagatagtttctagtctcaacaagtccaaaaataaaactgtccctttttttattattacccgaaaggaagttttttgtatctgttgattgttgattaaataactcctttagtcgcttcataagattaacttcattaatatgctttaacttatttaagaaaaattgcttatggtcaactgaaacattagaattaataaactctcttactttttcagtttcaaatgttagttcttggttaaattctaagctggagcaatatcttctgtgaaatatctctaaacactgaatatttttaatgaatttggtttccacgaactctttctgatctttactgttcataaataaactaactattgtactcagcttttctctttcttgaaaccagttatttaacaaagtttcataattgtgtcttaccttattataatcaaacaagaaatttgtattcttctgtttaagggcttctctgtgatgttgaaagtatttatatttcaattgttttttatcttctgtcacgtttaatgtgatatttatatcgtagttaatgttgttcattagaatgtttataagtctaacctgatgatttacattctcatgaaaccatttcaaatctttcctttctgatgggattatattaaatccactaacatgctccatagatacacactgtccagatttttgattcttaatctttaccccactagtttcttgtactacaaaatctttgactgtaaccttgtttatgtttattctctcataatgtatttcatgtttttcaccattagagtcaaatatttgagtgaaggcgctcaaacccatccattctgttaaattcccagttgaaaactcagcagagtcaaatttttctggaaatgcctctgtgtaatctcctactaaaaagctcctaatttcataaactgaagtgggtattccaggtgatctaaagtttgattttcctattgcaagaacatcaagtttatacaattcgccatctactgatattccattgataacttttggagtgtcaccaatatcaataaagtcattaactaatgtacccattatctctaatgtgatttcttctggtttatatattaacgtacctggaacttgattttctttatctttatcaatccaccaatacccttgtacagaaaaaacatcaaaaatatctttatttactatgtttttcataactaaactccttttgcaattaatgattttaataagggttaatactcagaagggagcttgtttgttccttttaatcactcacttaagtcgtaaatacaactttaattgtttctctctttcaatttatttctctttaacatgattatttcatggccttactctacatttaaagccgcttccattcaacatactcaaatcgctgctgataaagttcttcaaggattgcggcccattcaacccagccgtccgcaacaatgcttttcttctctccatcctcaatccattcaatccagtacacctgaacaccccttaccgagtaataacttcaatctgtcttatagcagaagtgactttaaactctgtatgtagctcgtttgagatcactaaagcttctgacattgtagtaaacttagaagcgccatgaagccccttagatgacttataaccactaccatccaacttaaatgacctgaagtaatcattattttcaaattgaatgacaaaaaagttatcgattaccggcatgattatcccctcttcagcagcccaacaatttttatccctaatggcagaaatccaattagtatataaaacaccatgatatttattttattcttaaagaacaattcaatcatgttttgctccattcctggtgaaaaggaattaataagctcctgtttaaaatcctcatcgtaaacttgatcaacgaataaggctttaaatcccgtcaggaagccaacaccaagccagagtattaagaaatacgaaaatccaatcataaaaccctcctccttatatacatcgtctggtattatagtagagttaaatatcctatgtaggtgaatttgtatggaagagaaaaattttgagacaaatgggtatgatgtttctgtcatttacgattataaggagtaccctgatgttaagtatggtcgctgtgacaactgtgattacactctgtttaagagttcagtgaaaagtggcgtgtttttacgcgagtgtcgtagatgtgggatgaagaagagtatctaaacactcttcttcatttatttttaggcttgatttcaatttcaagatctaagccgtctagaattttgagtaaagtgtccacattgtagttcttaccgttagtaactctaataatttgtggatgttttaaattaaccttttcagctaatttcctgactgaaagcttatttttatctagtccatctttaattgcattaatgatcttaagtttaggtacagagatagaataatattcttcaggaacttccataatgtcttcaatattcatttcaataatatcgtctttatttgataccataaatccatcaatcctttctagatagaatggtaccatatgagttaccactttgcaatcttttatttcactggaatcatgtagcttacatatacttcaattccatcttcagttctatattttgcaatcttgtctggatcagattcaatcttttcaataagtcgctttgcgcctttatttcccttttcactattggttacagcaatccaagaccaataatattaaaaaatagatgcagctttttagtattaaagcaagttccctgtcttaattttttccattaactatgtcgttgatcaataaactcgcttgcatatcggtatagctctttatattccgtttcatcaactggagactctattaattcaaccccgttctttacggcagtgtaggttcttccatcatggggatacgtttcccagacaactgggattgtaatatttttgaagtttgaaagttttttagattttttaaattcttctctttcagttatcctagaagctgcgatgtctattatctcgccatgctacccacatatgaaattcgaacggaggattccacttgtattgaactggtaatgatggaaatataactgatcctgcttttaattttgcatttttattgtatttctctttcaataaatcttttgttagataagatgtataaacacacgcgtcgcctattcttatcccagatttatcaaaagcaaagaaaatactttccacaatatttttttgaataagctctttattgttcattttgcccctccgtagtcgttaaaagaatgattttattcagtaacaccattttcatattcaaggttgtatgttgatatttcgtgtactcctatatcccctgcaaagtttccatcctcatgttcctgttgtaaataaacctctttatctttttcgaagatttctcttgcttcatctaattcagttacagcttgcgatcccattcgatctgttacagtaaaaactaagcaccgttttaactcggtaccatctttaaggactacgtctgccatgacgtacccatttggctttagttcgccaatttcattacgtcttttatcgattgcctcttgaagaaccacagaaacagtattgttatcagactcacttaaagccatttctaattcttcaatttcctcaagtaacacttgaatttcctctctcattttcatctctccctttgttgttaaatgaatcattatctctatttaagcaccctgagtatagcctgatttgtcaatagttacgagatgttcaatgtcatcatagtgctctgcgttcatgacctcatatatatcaatcccaagattcttttccaaatttcttttggcatgtaaaacaatcatattgtctgctttaatgccattaggcatttgtggtacacccgcatctgttttgatttctacaccatttacattaaaagttacttttactgtattttgcattgcaatctctcctactccctatgaaagtacgattttatttaaacattgcatttaatatattcgtcaaaatccggaaagataagccagtcatttgtcatcagctcatccactttttgcaaaaattcttttgatctgcctttcaatttaaaatcgccgtctcctccataaaattcgctcaagccttcataaccgcctgatttgtagtctgatataaaacatctcccatcaaaattcctattgtttcctgccttttctgaatctataattgcacgagtttcttcctctattgcttcaaaattgtaactctttgcaatccgatttacctctgtcaatctggagatgatttcatctgaccagttacccctcacatctcttagaagtgcttccattaagatgatttcttcttgctttatcatggcctttcctcctctaattaagtttgtattcctactccataaccttcccttcaagtacaacctcacttgcagtccaagtgatctcattaactccattctcatccatcaaggttttcgctttactatccgcgctcacttttaggtcttccaaactttcggctttaattatatcggctaatagcatatagtcctgatcgtaaaattttactgaataatccttcatatattctctctccttttgttgtaatgtgcgctttaacttaaccttgaaaattttcattcccttactttttttgtaactttagtataccatgatcactttaagtgatcaatatctttttaatcttttttgtaaatcaacagctcatgcaactcaatatctaaatatgtacaaactttatcaagcagatcccttggataccgctccatttcgtcatgatacagctttctaactgtgttgaaaccatggtcaatatcattggacagctttcgaatactgatattcctttcgtctaatatcggctttaaatttgatttaatcaattttactacctcacattcattatgtatgatcactttaaattatcaccatatgcataaaaaaggtcaaggatataccttgactatgtattaagcttaccaatcaaatgaatcttcatgttcaaatccataaatacctttaatccacacgtctccgcagcctggattctttgtaatctctaacacatgattacgatttgcatctccctctactcgatctgcagcagtatagtcggcatagttccctacaaactgcttttcactacgtggaaatacccagccagcaagagttatcctactgatttttatatttagagtacacccttctgcattgctaattgtgaatttgtagaagagccaagtgcgatcataattccgatcaaaataatctgccattgaaaaactctctgaatcctcactcatgtgaaaattcacatttttgtagtctaatgtaagcttcgcctcagcacttggtgtgttaaaactcaatataaaaccaatgcaaattacagccaaaaagattaactttttcattccctctcccccttttccaaattatactatatttgaaatgaaggtgaaagaacaggcagaagcttcgtgatttatctgtattcttcatgatatagctagatatacatgcatctatgaatatcttcgtgtatttataagtatctatacctccctatatcacacaaatacaccttattgagaacaaaaatatttattttagttcatttttaagaacaaatcttccatttttatgatataatcatcactgcttataggcagccttactgcttattcgccatatggtataggaaagaggttcttttaatgaacgtaaaacattctaactgtttctttgttatcaggctgtttgccgctctctgtgtgcttattggtcatgctacaagagatctaaacatttctgtctttggttatactccagagagtaaagcaatatttcacaccggcatatcaatcttcttttttctaagtgcattttttcttttcacttcttatgagagatcccagcttaaagggaataatgtaactgatttttattggagccgaattattaggatcgcacccgcaatatacacctatgctattgcctccactgtactgctaattgttctaggagctctttcattgacagtattcactactaaagagtactggacatggcttcttagcaatcttgtgctataccctcaatacttccctgacatattccatcacattggcacaggtcgccttaacgattcactttggacaattcctgttcagattagcttttacctggtgttacccgcaatttattggttttataaacgcttcggattcaaaaaaatgattctttgttcttttgctgtttctgcttttagtgtgctgatttctttcgtggttttgaagttcttgcctggtaatgtgttcggtaacctgtacttacattctttcctgccacagatgttttatttcactttgggcatcttctggacaaaggcatggagtaagtcaccgcagcaccttgttttatttttgtcttcggtaattttatttttacttattaaggcagatcccatgcatcttagttcaataaacagtacactatggaactttttatggtttgtgccgttaagctatgcgatcgtttggttcgggtacaatgggccgaaaatattttggcaactgaaccggttagatgatatcagtatggggattttcatatggcacatggtgattatcaacgtcttcctatacaccggaattaataaaacactgtctgattacccgttgatcatagttctaattgctgtcactgctgcaatcgcatttctttcgtacagaatcgtggaaaaacccgctcttaaattacgtaatatcaagaaaaacaaaccagtcaaaacgaagattgcgagctaatggccaagggctgttcatgtaggcagcccgtgtcccatttagcatgaaatggtgtttttatttagaaattagattattctttttcacaatgcgttccattaaattttgatctcttgtggaagttaacttttctctttttacatctccatctgataagtgcctattggttgttccagcttcttctctatcgatacaatattgaaaaatatcccttgtgtcttcttctaatattgattctaatgttcctgtgctcataacatggtaagaagagtcactaagcactccaccattttcctttattgcttcttcgagtccagtttcatctgcaatattaaattcttcaagtgtaatagcaatatgtgaaattcgcgaaatatttttaggtaacttttcatggtttataaagccgctttttagatgaccttcctttttaaaacactgagcaagtgcagcaccaagtgaagttttaagctcttctttatattttgtataatttgttgttcttaaacttatcatgggtactcttgcttttaattcaataaagataacgtgattatttttaactaacataaaatcaggggatcttaaattgttcttttgaaatctatacacaaactcttttatataaagataattatgaagttttaaaatatgttctatgtaatcttcgtaagggtgttttccaaaagcacttttgaattccaaaccttttgcagtgcaaatttgttgatacatcccctctgtaacagctatgaaaattgaaaaaggcattggaaataaaaggtcagagccatttgaggttacaatcggtttcattagtaatgggttgaaatcatagactttcatttttggatcaattgttgcaaattgttcatacaaaactataaattcttctctattaattaaaaaggtatttattaaagttttcacttttgtttcagaaaatcgggaaatttccccaagtgttctaataaaattatctttatcaatttcccagtatttcgaggaaaaattatataaagcccaagagaataacaaataatcttcatactcataaccaaacaattcaagaaaaatttttttaacattaatttcagggctttcataattaaacagatagtgatacctataaaaacttttaaaaggatgcctctgataaataaattgttgtaaaccgactctcacagaaaattgtgacaataattcctgatcagacaaattcaaatcatctttatgcttaaatggaatattatattctcgatataacttaattactttcactaaatcattataactaatatctggcgtatatccaccccactctttccctattatagaggctaaggagagatatgctagttcatgattatatatgttacctctaatttgttttcttaatatattattaggcaatagactgattaaaaaatcatcattaggattaattacagatgtagcatgatgtaacactcttaataattcaagtttagaattaaaattaaatctccttaatcttttatcaatctcattaagtatatttatgttagactcatagttatccaatctcttcccgccctaaatatttttctcttactaaacactacttctaattaattcaatattatagcatgatactctatctgttaactctctttaaaactgctgttttattggaacctataatacaaatgtttttgactcttcattcgaaattaacaagataaatccctgttcttcatcttcttttttatgggtttcgcagtaatctgaaattccccaaaatctgtttggatatgtagtattttttgaaggtgaataaattttgtatctgttaacttttccgatacattcttttgaactacaagtacaaatcattttaatctccccattcagtttaaaatatgcatttcatttagattgttagcaaacaagctcctgttgcctatactcatcaaaaaacatattacagtgaccaatttgactaagatacaggctctccttaggtcttgttacaccgacataaaataatcttgcttcatctaaaagatcgctttttctatgaggaaacttaccatcttcaaccccaattaagaacacatgtttaaattctagacccttgcttgcgtgaatactcattaatcgcacggcattttcatttttctttttacttggcttgctgccgtatacaaaattaatgaactgctctaagttattattcttaacaaatttcttcatggtattgagagattcttttctgtcagttatctcatcttcatcgaggtatttctcttctatgtaatcattcattctgaaagttttaactacattgtcgatcaattcttccacggcaatccctttaagcacttgcatttggagtttattaatcatactttggaatttcaagacgttatcgttttgagtcggacgatcaaatctcatatttaacatggcctcatataaggacatatttgtttgtccggcaaatgactcaacatcttttaaattcttattgctaaaataacgaaatggatcattccttagtgtgaaaatatctcgaaaggctgcatcatcatgtggatcacgaattaatcttaaataagctacaatcccttttacctcttttctcttgaaaaagctcccattattagtaatatcatattcaatttcacgcctttttaattcattctcaacatagctagaatgagagtttaatctataaaggacacaaatttctgatggtttttcaccggctttaagcaatgtttcaattttatcagctgtattcagaccttctgcttctctgtcctgatacgttagtgtttgaatttcgccattgttatgaatattagggacggagtctgcgtaatgttcatagtcaccatagtattccttgataaagctgtttgcgttatcaactatgtttttatttgatctataatttgtatccaggttaatcacagtggcgttttcccaatccttttcaaactccatacaatactcagtattgccgcctctaaatgtgtaaatagcttgtctataatcgaataagcagaatatgttaccagaggcgcaaagttcttttaaaatgagattttgtactaagttagaatcttgatgctcgtctacaagaataaattcatacgtatacttatgtttattgttttttagcaccttgtaacactccaataaataatcatcataatcgtacagtccgtttttggatttaaaagcctcatactccttatagaagagacgtaattgctcctcggtatatttactctctttaattaaaaactcgtctgtgtagccccttaaaaagttcttttggtagctgatgaaacccgtaatgtctttaatgtcaggtttctcttcaagtgatttaaaacagttttctcgctgccattctttaatcgtatttttctcgttaatttcaattccctctttgagaagaatgttgcggcatactgaatgaaatgtacctacattcacactagttaatttctgcttatgtaatttcttcttaagctcatttgcagtattacgcgtaaaactgatggctaaaatatcctcttgatcttcaccgtaatccctcaccaatgttttaacacggttaaggagaacggtgcttttaccgctccctgcccctgcaatgactgcgcaagctcctttataaaaattaattgcttctaattgttgtttgttaaattttacagtcattctaaataattcccccttttgttccctcttctgttttttctaaatatgtaaataaagcattgactttctcttgttgaagtgaattattttcatgcatagctatgtattcgttaattttcttgtcaatatattttctgctcggtgtccatcttttaacaactttcaaagcagcttcaaagtcattaatgttaatgctcgaagtattaggtacatttagagcttcagatacttttccatagcattgcatcaacaaccctctataaaataaaaggtgttctggactgccaattggttttacataatcaaacactctgcttttagcagcatttttaaactctagaaattttcctgatttatcatgttggaaggtaaagaatgtttcatcatattctttaaattttccttccatctttaaaatttcttctgcattttcactttcttttaaagacaactgctcaacttgcagctccagctctttttgtttatcagccatttttataaaatcttcacttaatctatttacttttaaacttagtaccttgtccatgagcatatcaatttctccgtttgacattttgttcaattccagttcattaatcgccatattaaaccacctcaataatattatttttattcgtaatttttctcatttctttgcaccaggattccacatgcccgattacagaatcaagattgttcattataatttgattgtcactcatattcctaatggcctttgcatactttacaggcgctaaactaccttttagtactttttcaatctcccaaaccatttcagaaagctctgaagtggcctcaacttgtctccctagatcatcctgttctcttgttacggcctttaatttgtttgttagctcctcgtattcttttactttcacatcactcctttcaagttgttgctctaagatcattttttgttttgataagttttcatattttttatttttatactctaattctttttttaatgtgtctatttgtttgtagtcagtgttatcaatgactttttcaacaactgtcttgtttttcttttcttggtttaattcataactaagattcttattatcctcttcagctttcctcagcttagcttcaagctctttgtattcctttaatgtcttaacttctccatttaggactgcttcctttgcttgtttctttgattctgttgattctgatgaaggttttgcaatttcgtaagttaaggatactgggagatcttcaagcaacttttgatcgtaacaatttgttaccaacgaatatctttgaatcaatctgttcgcttgcatcttgtttaaaccaatagattctacccacgcttgaaaataaccgtacccattcttagctaaaacatcttgagcttcctttaattctcttcctagctcggtataagctttacctacaatctcacgcatattaaattctttttgtttaaggaaatcagcagttgattgatcgactaaatcatatttgaactctgttgataattcgtttgtcattgtctttacatcctttctaagttaccgttcctatccatttttaactttatgtttttcaaagggttatcctcttttttcactttttttgatttggaaccctcttcatcaaaatcaatcaactcgcttgcaataagctcttgaagcttgtctattcttttcttctggctttttactttgttactaagtttattgatcttgtcatctttatcagctaatagtttgtttgttccagtcttttcatgtttcaaagacaaaatttcgtttttaagatcaaagatttcttttgttgaggtttctgtcatgttttgcacagattgctgcatattaaaaatcggcgttaacatgttcttcacctcatgtagaatttgtatattgttcgacttcatcatttctttaattacatttgtatctgaagcaggcacaacaacttctttcctttcatgaaaaaccgatggaacaaactcttgttgagtaccgtcctcctcatttgtgagttcttttcttaccttaatggctgtatctgaatttttaaggatcattgccaatcttaaagctactcttttaggaacgatatatagcttaatgaatttcccaggcatattatatttatgcttaaatccttcaagctctaatccttctagtttctttagtccatcttcaaccaaaacctcattatttctgtgaatgtatgtagtcaatgtaggtactttcattccgaaatactctgacaagaattttattgaggtatgttttttgtcacctagcatctttaactttttcactttgtccaagacgtcaattcgatccatgtactgctctctttcactttctttgattaaatatagattggtattcttcatgttatgtattctcctctttaaattttttaagtttaatgcgcccttaaaacattatattttatttttattcttaaagtatattcacttcactgttgctttaacttgattagagtatagcatgagtatttaaaattaacaatagttattttatttttattctaaaaaaagaagaacatattatcgaggttcagcttgctgaaacgagacggccgtaaaggcactttacggacgaatttattatttttttatttaattatttttctggttctccttaagacttaggctctaaaacccttgatatgactggcttattttttaagtttaagaggtttgtcctctttatcaagtatcgagccagtttgtgagcagcttcctcattctcaaagaaggtatgtacaaagttatttcttctccatccctaatagcagacctccatacccattgcactaactcagacaatgcaaatgcgtcctggtctattgtaatactgtacttttctttaaaataattatacagaacagtattcgtatatctgtttattgtatatgctaagtgtttcttatgcttaaactcgtttgtagcacgtgcattacatgagacaaacccctttgtatacccattgccctttattctgttcttatggtctgaataagtcgtccacatagcttcatcacttgacgacttaacaatattattaaagtaattgaatacattgttcttcacctttttgattgtgtaaggtgatttatttttataccaattagaagacagtgaaaactccagttgtcctattgtatttaggttgccttcatatatttttattttatttcttaactcttttttaaagttcctttcaaaatcagtatcatggtcaatgaacctatactgtccatctatgtaagctgaaatatacttctgatactcaatattgttcacatcgtaataatatttttgtatttgagcatcaaacatatatgtaagtatgtaaacctccttgaataactggaatacgtcggcaggaaagttccaaatcaatatattatctttaaaatacattaggttgttatttaacgccatatctcgaatatcatcgtatcgtgtttcataatcttttttctcttcattccatttgacaaaaccgttttcaacataaatcaaattggaatcaaacagtgttgttagatcatgtttctttacctgtaattgttccactacttccatgacttcatctaatattagtgtgtaattgcctgcaagtataagttcctttgtctcgtcgtttgcgtttttaaaaaggttatgagttgccacaatgtttttattctgtgataagagttcgtgaaaggattcaaacttatattgtgttttatcacctttcttctttactttaggttcgaaaaattgtttggactttatgcttttctttatgcgctcaacttcatttaaataaggtgtgatgaatataaaggtttcttctttgccagcagaattcattttgttaatcgctgcagatgttttaccgctccccataaccgaatcgactattttaattttattcataatataaacagacttccccctttaatattaaaaataaaggaacggataaatgttttaccgctccttctcatgtatgaaattcaattgttgattctttcttcaagatcatgaatacgtctttcaagtccagagaatttcttatcattgtatcggtggtcactttcaatattcttgttaataatcttaagcatggatacaacctcttcaggttcattttcttcgattcgtttaaccgtttctttaatatccttaacgtcctgcttaattgtgttaatatccttggaaagttgctgtatcgcttcaaggatctgattttccattccgctcacctctaataagcttagtatagcatgatgtcagttagatttgtttaccttcttttggcgtataacaaagtaagcgatccataacaaaatgataatgatacacgttactatgaagatagccataataagcgactgtattccgctgctgaagtaatctttgatgaagaggaacaataagaataaaacaataaatgttatgttcgtaaaccataatgagaatcgtttcatatttacaatgtgcttgtccatgttataatatgggtagtaactaaaggggaattaatcccctttagcgtgttatctgcgtatacgtttgcgttgtctctctggtcggagacgcttgcgtgtacgctttttctttttgctttccttattcttcatcaggttttgaatcttctcagctatcgttaaacagttgatgattaaaaccgtgataggaataaggaaagcaattgttatacccactttctcaagcactatgtacacctcctttcctataactctattataacacatttttccttcgaagtcattttatttttactcttaaaatggatttttttaaattattttggcactattatttatgggtgtttataagctttatgaggcgtgtatgtggattggatacccaatgtactatgattcatttaaaattgattctaggtgcattagaatgcttctgatgatgtgtggtgaatggaaacggatagagatgattaggtaagattaagggtggatgtaatgaggggatgagaaggaatattattagagtgaatataaaataggtattcggattaagataaaaaattgtatagataacacttcgattcattccctttcgttatacacacgattatttttaatgaatgggtattcacttttatattgaccacttaattattttttcaaaaataaatattgtttttcatttgaaattgtgttagttgtgcaaatttatcagccaaatcataaaaaccctacataacgtatcttatatagggaattcaataccaatatatagggggtatattaacatctaaaggccaaaaaacaggaacaaatgtacccctagcacttccatttccacacccaacttattttttcacattcccatttttcagcctattttcgcatcgtaatcgctatcgtaaaagcctatagtatcaatgtttttccaccccttattctcccctttttcatcagatttttaactcaacgaccacttttcctctctcctgcctacgttttacgatcacaaaacacctattatcccctttgacagctctaaaacattgctatatcaactaaataaccctttccgaccttcatttacgataagcactttttttagctcacgatcacccaggggggtcattaaaaatcaaaataaaaaagccaccttaataggcagcttccctttaaaattaacgttttagtctcttcagtgcctccatatacgaggtctttttcgattccttgttctccagtttttttggtttaaataaatcctctctacggcgattcttcgctttataaacagttgtttctttaacttcagtatttccatcttcaattagatcatctaactgcttcatccgttcattgatccaggttaacccgctaagaatcgttatcgccctattacctttatcataatgccctttaaataaatctaggggcatcttgttttcaaagacattaaacagctcattatacgatatatgctccgttaagaactcatgaacatctaggataactccagctctcatcacattttcaaactcaacaggagtgaaaatcgaattgttccacgacttttgtatatcttcatgcagcttatcaaaatacttaccctcatttgtaaattcattgaggtctgtttgagcaatagtcatgattcctggtgtatcaaaaagctgatttaaatccttcctgtctaatgtactgatctttgatcctctgtccgtgtaattgagtaagatttcaattaaatccaggaacattttgtttgtttccttgtagagtctgctctcagaaagcttcccttcatatttactcaaaaccatttgattatccaaaggtaaaacacatgtctctggcatagataagtcttcaagtagctccagtgtattcatctggttaaccaatacctcattattgtcaggaaggattggtacagcaactattgttttatgtgtaagacattcgtttaacaattctaataatataggggctactcctgaaccggttccaccagctgcagagaaaactacgaaaataacttgtactgaaggcttttccattgtgttctttatgaactcaatagaggactcccagttatttttcatatgtttcgctgctacgcttctgtctttacccactccttctgttccgaccaaatgcagcttatcttgaatattgaccaatgaattaaggtctgaaagtgaataatttattgcgacagaatgaaatcctctcttcattgcttcatctgctatacttccaccggcctgacctactccaataaatccaaacattaaaccctctccccttctaattgatatctcaaagcttcttgaccatattgagtaataaaaattgtatgctctttactgtttttcactatattaataaactgcaaggcctcaagacgatcaatgctctttctaaaggtagcatcagttaactgagtttttgcttgaatggttttcttcctaattgatttaaactttaaatcagccccttcatcactcaataagcctagaatatacagatcatttcgagttaagttgtcaattacagaatcaaaataagtatccatgtaacccctccttaatatctgatgattttgaagtatcttggttgatatacgattattatattgtctatttgtatttaaatgcaaatatttttgtatcttaatgcaaataattacactctgcttgtatgtaaaccagtgattttataaaatttattcaaacagcaaaaggatgatttaaatggaatatagggttaaaagtaagttggattcatttctaagcagcaaaggtatcgaaaaaggctggttagcagagcaaataaaagctgaaagagcaagtatatctagatggtgtaaaaatgacagcgagggatttgcaaccgtcctccctagtacatacaatcttttattaatggcacatattctaaattgtaaagttgacgatctttttgaattaatcgaaattaaatccaattaactttggatttttatgtttacaagagtaaaaataaaatatataataaagacacaaccacgtgaagtggtctttattttaatcattttaagagtaaaaataaaatagtatggaggtgtaagatgaaaaagcagtatttatttagtcatttaatggggtttattgagggaaaagtagtcgatgggacagcaacacccgaagaagaatacctttatcaggattacaaatggtacggaaagattaataagcaaagctttacatatcgaagtttagtaaatcaatatcttaatagcgaatattaagcactttcagagtaaaaataaaataaacggaggggattgattgaaaagaaaaaaagacggattgtctaagcaagttcacatttacagtgtggatacatcagcattttataatgacaaagaaaatttattacataataagattttaaagtcttatagatacagagattatcttaagacattagacaatgtacataataaacataagaaatacatttcacaaagaattacataccttaaagaatgtctctattctgcattcgaagaacataatgacataagaacacttcgaactgacagcttaagggacaataaagtgatttctttatttgattcagtgttgacccgaacattagggattaaagaaaataccctttcagaggaaatcatggttgtccagacttatcattttgaagtattgaaggacattattgatcaaggatttttacataacaatgaaaaatacgtttatttcacaagcagcgccggtcaaattcgtacaaagaagtcatgtttcattaaaaaaagcacctacgataagtatcaggatgctttgacatgcggcttaagtattgaaaagatcaactcccttggtggtagcagcattaacaaatggaatagctacatggccttatctaacagcgccagtagcccttgggagattgatattgataaagctattgtagtcaacgacttagaaaccgatgtgtcgagtctcgttgactacattgatcgagaatacgagatcactcgaaaaacaatgaacattcccattgagcatacagatggctgcggaatgatactccccactctaagtcataaaagcttcatggtaaggctcccgtgggtaaagggtttattagtcccttttgattttcgtaaatttgctgaggaaaacaaagcttttaaagtaactgatatatacggcaaggaatgggacatagtgaaagatgatgttcaaattatcttcactaaaagtcagtttaaaatgtggaagtattattcatcgtgggaagaatatcaattcaattataaaaaatatggatgcttaggggcaaaactcaacgaagaagatccttctgttgaaggcaagctcacttatcaaatgctccagacacttacagatatctctgatgaagaattaattcaaatgagctcaaagactgtaaaagaaataaccacattgggcactgataaagagaccatgttaagagttcttggagctacggagaaaaagaaacatcggacagctcttcaggacgctttacttctatatccagaacttcttaacgatgatcacacgaaagaaattattaaaaataaaaagaaaagcatgatcaaagatgccaaatcaggaaaattgcttgtggatggtgctcgttatacatacttatgccctgatctatatgctttctgcgaaaaattatttctgaacatccagaatccaaaaggactgctttcaggaagtgatgtccattgttctttatatgatgaagggtatattgacatcctccgctcccctcacctattcagagagcatggtgttaggtggaacaaaaaagatgagaaatatgaaaaatggttcattaccccaggtgtttacacaagcatacatgatccgatatctaagttgctgcagtttgacaatgacggggataaggccttaattatttctgatgagttaatcgtcaatattgccaagcgtaatatggaaaacatcgttccgttgtattatgaaatgtctgtagcccagaaacaagagattaatagcaagaacatctatgaagcactaactcttgcttatgggatcaatatcggggagtacagcaacaacatcactaagatatggaacagcgacaacataaacctggacgtgatcaaatggttatgtatggaaaataactttactatcgattttgcaaaaaccttattcatgcccacccgtcctgatcatgttgatgaaaaaattaaagattacataaaaaataaagtgccccacttctttatcaatgcaaaggataaagaagaacatagtgttgagttaattaatgaaagcacagtaaataagttagactccattatcccttctgaccgaattaatttcgcagctgtggcaggaaagttcgattatcgtttccttcttaagaacaaggatattaaattggacgatgcaattattagtgaatacaaacgattagaccagaacaaaaaatggctcatgaatgatgaagacattaagcctggacaaaaactttatgtttataaggttatcaaagacagattgttgaagatacatgaagacgaggaatatgttgctgatgttttagttaagcatttatataaaaagaaaagcaaatttaaatcaacattatgggagtgctttggcgatgtaatattggaaaacatacagaataatctaaaaagatttaaatcttgttatagttgtggaaagatgtttaagtcaatctccaataaatcaaaatattgtagtaaatgtgcattggaaattgaaaaaaagaaccatcgaataaggcaaaaaaaatacagtaagaaaaaaatgacgaaatagaaagtgccttgagccttactcccccaaggggtacagcgattttaccggaaaaagtttaacgaaaaaagcgccttgaatccttgatatgactggtctgaaagccccttttgagataatcgccataagggagaaagaaagctaatttccacatataagggtgagtacgtctcccattttttcaaaagaagcacaaacgataccgtaattatactttaacacaaaaataaacaaaatcactaggaggaattaaaacatgaacaaaacagaatttgttggagaagttgcagagaaattaggagttactaagaaagaagctacgcctaaagtagaagcagtatttaatgtgatcgttgaaacacttacaaaaggtgaatcaatcaagattcctggagttggaacatttgaagttcgtgaacgtgcagctcgtaaagggagaaatattcaaactggtgaggaaatcgaaatccctgcttcaaaagtagtgaaatttaagcctgctaaagcactaaaagacgcagtaaaagcttaataaaattaatgaggacgacaggaaaggcttcctgcacgctttgtcacatagagcttatgctcctaaaagtggcagagttagatgttatggaggaaattgtcgccctcccctctttttacatgtgttcatctccaggttaataaattagagttcttttattggtggcatgggggtgtcgtcaataataagctgattactgatatgtgggatatcagttctccgctaatattcatttgtttgaggacttggaatgtcagggtttcggataagtggatattaacggggtattgcccttgcgtggaagaagctttttctaaacatgtctattctcactttcatacgaacaaagcattaaattcgactttacaactacaactggtcattgtggttggtcggataatggtcatttatgagggttcgaggttaactcggatgtctgtatcttaataagataggtaaatggatattatcgggctaaaaatgtctataggcaacaacttagcctctaaacttttcaggatggagggtcaattttggttgaatttgattatggcgaattaaagaagacaatcttaaaaaactccaaagctaatggaattgaaattaatgatgaacaaattgaattgtttatctcttctgaagaagagtatatgaggagtattggtttgatctctgaataattacaatatcagagtcaagtgttaatgattttaagccacctacggcaatagatggctctttctcagtagacggcaatctactgattctgattcagttcttttttcacttcaataacgattttttgaatgagtttctcaaacgcttttgaagcaaggttgcgtgtcatagtgacaagcataaaaattaattgcggtgtattgcttcggcttgcacttaggtaaggaagatgcgtctcccttccctttaaataatgcccttgtaagctttgttgcttattagaggtaatcaaaatttttccgggttagtgagtcttctatgctcgtaaaataagcggaatggtctttgagcgcctgatcaacgctcccatatccgcgcggaagggttattttcggtcttaccttccgatcccatttgcgcatgtaccaagatgtacaaggcgtttctgaagacgataatttgtcttttgtttcgctcgttaatatacgggcaaatcacgaatgcggtggcggaataggtagacgcagacaagccggagggccgtaaacttatgcgaggtgcaaatcctcgcccgcataataaacgaatagccaaggcggcgtgtcaagttatcgcaacttgcttatcaataatctccttcgggcgtttccccaacgcctatccgacttatcttttcatctcccttatatccccttttcggacgttaccgatgcttcggatcatcgggcttccgaaggagcttattgtatgtaaatagaaaactattggaggaatttaaatggctaagaaagttcatacagtaaatttaaaaggaaactatacttacattgatggaattattgaagaagaaacaaaaacagatatcgagcgttatgatctgaattcaattttaaaatcatttgatggtcggaaagtgaaaatttctattaccgaggaagacgaacttccacaaatcaatgagtaggtggtgactgaatgacagctattatagatactgttttacaacgagaaaaagacgaatcgttcactgattatcatattagacttttcaaaaacaaagacacttatcacattgacacaaaaacaattgctacccttttaaacaaggatcagggaaccaactatgatgaaagcaaatggcgtaaagactttaaacaatttgaacgctggcacgattactttatctcaaagaatatgaacaaagaagttcaacaaaaacatgaagaaattcgcattgaatctgaaaaacaaacaattaaagcacgagatcaaaaaagagaattccggaaattcattgccaatcaagcacggtttgaacaaattaaagatgatgttgttcaagctattgcatctctagagtcaaaaagaccccttcgcttcaccttcccatcacctgctattgctgaaaaacatggactcgctctattcagtgattggcacttcggaatggaaatcgacaaccgcataaataaattcaataaagaaatttttaatgagcgtgtagaacatctcaccaacaaagtaattgagtatggtaagcagaatcatatttccacactacatgtagcaaacctcggtgatttaatcggaggtcttattcatgtgtctacaagagttcaagctaatgaagatgctgtagaacaaattaaatatgtatcagaaacgcttgctgaggttttagcgatgttggcaagtgagtttcaagaggttaagttctacaacgtggcaggaaatcacggtcgtctctccccttctaagaatgatgtggggatcaaagaaaactttgaatacctcattaattggtacctcgaagccagattgaagaacataaagaacatctccattgaacctgagcaagacggattcatccccgctaaaatcaacaatcaggaagtcgtgtttgtacacggacactacgatcgtgttgatcagtgtgtaacacggttgcctcaattacttggctacatcccttcttacatattcggcggtcatattcatcacaattacgaaaaagagtacggtagcacaacagttgtagtaaacggagcgcttgtcggtgcggatgattatgctatgcaaggtcggtttggaacaaaaccttctcaaaaatttatggtttttgatgatacaggtattgaggctacatacataattagatttaagaatgaaatatagggttgcgaccaatcgctttaaggagaacgattatggaaaataaagatttcatcaaagataatatcggttattgtttaagtaagctgtctgaactacgcaaggaaggaaatcatccggcatacaaaactatcgccaaatcgctgtgtgagtacatgaagatgataaatactcaagacatgaatgaaattaaatatttgtcaaatattaataaattaatctcatctgaaatggacaatctcaaaatctttattactacttcatttaataagagggattttaaagcttatcatagtttaagttgtgttttcggtgaattgagtagaaatttaggttctcttagaacttcccttcgattgatacataaagaattatctgaacgtgtactgcattatcaaaaggaggattaaataatgaacgttatttcattcattaatgaactttcaatttattgggatcaattttcggaagaatttaaaacggagctttccttaattgtttccagttaatttccacaacttagcctaatcgaagtattaggacattattttttcaactaagggagccttgatgtaggctcctattaactttgtttattgaggagctaattaacctttggattttcatcccattttaaactcaattctcaaaagttattggaggttaaattatgtggatagatgacggtgtatcagtatggatgtgcgaccgatgtggcatgtcatggtgtgaatgttgtaatgaatgcggaatgccacatagcgactgtgatggctgtgattgccctggttgctatgagtgtaatggtgatttagattaaaactttaattttataaagatgaggatgaggaagattgaaagaagaaactaaaattctttgggaatatgtaaagctactaaaagaaattaatgatagtggttatctatgtaacagggaattaaaagacgccctaacaagtctacataaaagcatgggatttgagaaaaacactaaaagtgaacaattgaaccaagatgtcaaattctctactaaacccttaaacggaaatagctacacattgagctcgggctatagtcctgaaagaattgctgtaattaatcctggaagagaagaaacaacctttttaattattgatttatacaattcccgtattgaggacatttcaaagaaagtggaatatggaacgtttaaacatcaggctagtcaaataaaagccataattatagacaaacgaccgagtaaattaataattgatgcaaacggtattggaaaaggtttgcttgatgctcttgctgataccttaaaaggaaccaaggttgttttgtccgaaaatggtgccttaacttataaataaaatacttttttagaacgtccagtgatgatttgagaaatctcgactccctctctattgctgggcgttttataaaacgtgtttttgaaccaaaattttggaggtgaaccaatgccaagaaaagctaaagaaaaggaaaaattgatctgtgctgcttgtcaaaaagaaaaggacaaagagtcggggttctataattcacgaagtagtctgtatgagaaaacaggaaaagtccctatttgcaagacttgcttgaagaaaaacattgattacagcaatatcgagtcaatatatacagtcttacaacagatcgatgttaaatttgatccgttgtattgggaacaagctgaaaagagaaaaacagatacatttagcgcttatatgacaatggctaattcattgaagcagtttaacggtactggttataaagacagtgtttttgacagacaaccagagaagccacttatagaggaatctacgcctacaaacaattctggtgttagccaatctgaaattccagatgacctgattgataaatggggtattggttacacccccgatgagtaccgtcagtttgaaagaaaatacaataaacttattcgaaattacggagaaaaaaccacacttcatactgaaggcttgctttcatatattcgtttccgtgtaaaagaggaattagcaactgctaaaggtgatgtaaaagaagctaaagaatggggttcattagcttcaaaggcagctacagatgcaaaaattaatgtatctcagttaagtaagagcgatatcagtggtggagtcgatgtactttctcaattatttgaagccgttgaaacagaattgggcattatcccccttctcccccgtttagcagcccaaccatatgatgacgctgatctaatcatttgggcgattataaattattacagaaggctcgaagataaggaaaaagtcgactacaaagacatttaccacttttatgatgaaatgcttgaagaggacttcaaatcaaaaggattgtcgcctgaagaaattgataaactaaagagtgctcgcaacaatgttttcagagacttggagaatgtgtacaaagaacctctttatgacacaggtgatgaagattaatggctagttataaaaacttcacctcgaaaaacaagaagcacacaaaagacagaacagatatttacgacgcagcttttgaaacccctctgaatcccgatgacaattcaaacctcattggcaagaatatctccaagtgggctgagttcacctcatttattcgtttttatccagacattttttacgatatgttgaaacccgaagtcggcggaattgagctggatttatatcaaagagtgatgatgagaaccctcagtcgcttcccacagaactacttctgtattccacgtggcggatcaaaatgtgttgcaggagacacagttttatttactgaaaatggattagtagaaattggcgaactattcaattacgaaaaaaaagagtctgaagttgaaacaatacataaaatctcaatgaaaaacagatatggtctaatggaaacttctatggccggcatatcaagcggattcaagaaaacgaagaaaatcaaaactcaagatggttatgacttggaagcaagtttaaatcacccagtattagtaatgtgtgaagatggaaaactaagatacaaaaattctagtgaaattaaagttggggatttattacctatttcaagaaacaataatgtatttggaagtgaaacaaagctaaatgtaagctttgatgatttcttaaatggatttagcaatcaaggcagatggcaagtagaaagaaacaaattcaatattccagaacacattgatgaacaattagcattaattattggttatcttcttggtgatggttgcttgactagaaacaattcaatactttttacaaatgaagacgaagatatattaaataattatatagattattttaacaacgtattaggtattgcagttaagcaaaaagatagaattaattttatcgtatttggtaagctcattcgagaattcttcagacagttaggactggaagaaaaagatgcttttggtaaggaaatacctaaaattatacttaaagcacctaaaaatattgttgcaaaaacaatacaaggtctatttgataccgatggatgtgtgacaaataaaagcgtacaattttgcactgcatcagaaaaaatgagtaaacaagttcaaatgttacttttaaactttggtattatttctttcagaaaaaaatatctaaataaaaaatttaatacttatcattataagatcaatatttctacaaagaatattgatctttttttacgggaaattggatttagttgttcaagaaagcaagaaaaacttatatcaatatgtaacaaaaatcgcaatccaaataaagatgtcatcccttatcagcaagataacattatagcaatttatcctaaaggtaaaacaagagataaattttatcatgttcttaaaggatctaatgatcttacttacgaaaaattatcactattattaagtgaaaatgagcgttttgataataaagatagcgatgaattcaaccatttagtagagctttatgattctaattactattacactaaagtaattgaaacagaagactctgagaactacgtttatgatctatatatgcctttaaccaactcatttgtaagtaatggattagttagtcataatacattgacccagattatggttgcataccatacagctatatgctttcctaatgtaacgttagccattaccgcttctacaaaggaatcagcggtgaaaatttggaaagaaaagcacgaggaaattttaaggttttacccttccattaaagatgaaatcaagagtgaaaacttttcaaaagacagtggtcgagttgaatttcaaaacggggcgatcatcgataacctggcaaacgcccaatcctctaagggtttacgtagaagacgtggctccttagaagaatcggccttgattgataaagatttatacgatgacgctattgagccgatctttaacatccctcgcacaaccatgactggcgaaattgatcctgctgaattaaatggtcagattaaccgattctctacatcagggtataaaaactcagatgagtacgaaaaaatccttacgatggttaaggaaactggtgatcttaaaggatcctttgtattcggatcagattggcgcattcctattcactttggtcgtcaaaaaatgtctgttattaataaagcacgacaagggaatgtaactcgtttccgtcagaattacctttgtgactggattggcgcaagtgacggcgcattaattaatatcagtaaattaatcaaagcccggactattacccatcccgaactttcttgcccgagagataaaaataagaactttttgctgcacgaatatgtaattggggtagacgtagcccgctctgcggctgaatcaaacaataaaacagcaattgttgttttgaagataatcagaaacagcaacaacctcattaggcaagttcaagtggtcaatattatagagccaccaaacggattgagttttaaagaacaatcaatcatggtaaaaagagttttcaaaaactatggaggaaatcaagatacttccctctcaagagttaaagctgttattgtcgatggaaacggagtcggtggcggtttaatcgaccggttattagaggatgttacggatccggagaccaatgaagaacttgggtgctgggctacaataaacactgatcaaaagccagatgtcccgaattcgccggaaatcgtttataaccttaaatcccaaggtattaaccaagacattattactcaattcctggattatgtagagtccggaaaattgaagttgcttaagtcctatgatgacatcaagaaccaaaaaagcatatctgacgatgtaatgattgaagcagcatgtattcaaactcaattgttcattgacgaagttgcaaacctcagaattaaaaagacacagaattctttcactgttgagcaagttgtaaaaagaattgataaggataggtacagtgcaattgcttatgcactgtattacatagctttatttttagaaaaggaagaatccgatgatgaatattcatttggattcttttttaattagtaattgaggaggtgaataatgactacacctgaaccacagtcatcatatgagtttaatacaaatttagcgccgcttgattcgttgttctttaatgatttatttaacggcatttcttacgacaaagttaaatcatggctgaaagaccacaacgtttacaataaacagattagggatgcctctaaattgctttataacgcaaatggtgtgtatagaaacgttattgactacatggtagccctccctactttagacagagttattttgggatcaagtaaagtagctgatttcaaattgaacaaacaaaagttcaatctggccttaaggaaaatcagcgacaaaagtgttgtcagggatgcattaggaaaactcagcaaatatggcactggtttttattattttgattctgtggtgaatgattccttccccactactctaagtgacaatgagatcggaacaataactgaatcaaatgctattgacgactttaattgttcagtcctcccccttcccctcgattattgcaaaattatcggcaggaaaaattcctcttatcagttagcttttgatgtctcctattttgacaagttcacaagtaacggaagatcactaaagcttagacgatggccagaagaaatcagacaaggctatagagcttataagaaagatcaaaatcgaaaatggctagttcttgataacaataagaccattgctgttaaaggaagtagcgacattgaagatcaatggggacgcccaatcggtttatctgcatttattgatatggtttatgatgaatactttgttgacactaaacggaacattttagatgaacttaacagtactttaatctaccagaccttccctgaaggcgatcaaaaagggaaatcagctttatctcaaaagcaacaggaacagcagcatgagaatataaaaaaagcgttagttgctaaaggaagcgttaaaggtgttaagttcttttctttggcttcgggaacaaaattagacaagttagaaactaatgtggatttcttgaaggtaaaaggtgaagacgagctcattaaacgtatcactacaaatttaggatttgccggttctgctctcaacggacaagatggtaactactcttctcaacaaaccaatatcgagatggtttcttcccaaatattctcctggttagaacaaattcaaagtgaatttaacaaggtgataaacgccaatatcatcaaagatcctcgctcttatattgaggtttactacctccctcttacccacgttaacaggaaagaaaaagtccaaaacatgaaagacctttatacaagtggtcgaggcagccttattgcttggatagccgctactggatggaatcctgatgcttacttatccctaatggaatatgaaaaagacgaaggttttgatgaaaaattccctgttcatgcgacctctttcacaatgagtaagaataacgataagtcagctggcgcgcctgagatcgataatcccaaaaatgaaaacacgattaaatcgaagacaaataacagtaacggaacgccttctggctcttgagaggaggtgattaatatttgaaaagcacgattttagaaattaataatcagaaaaaaaccagtggtcaaacatacatcaagtgggtcgttcttgaaattcatgaaaacaatactcagtttaacaagaacggtattacctggctggagaaatacataaacgctaaccttgaatcaatcaagctaatgccaatttgcgcagagttcttggatgatgaaaacagtgagccattcggacacggtttaacagaagtcaaggacggcacccctctctttgaaaacagcgcagtggttggtactactaccaatgcttacattgacactattgatgttattggtgagccaaaaagagtgttaatagctgaaggcttcctatacaaccagcgctaccctaaatttgttcaatggttaaaatcaaaaatgtttgatggtgatttccctgaaacctcggttgagatagcagctgtggaaggttcagatgcaattgaatatgaaggtggctggaaagaacaaggacgtatacctatgaaatttgactttacaggtgatgcaattttaggtattgaccctgcagatgacgctgccattttacttgaattaaacagtaacaaaaaggaggataatttaatgtcaaaatctcaagaagaagtagtccttgagttaaacaacaaacttgataataagaataaagaaattggagagttaaatcaaaaagttgagaaacttactgaggacttaaagcaaaaaactgaagaactgaatgctgctgttaaagctgcaaaggatgaaaaagctaaggctgaagcaaaagaaaaagaagcgcaaaaagccaaggatgaaaaagccaaggcagatgaagagcttaattccctaaaggaattcaaaaacaaggcggtagccgaaaagatgcaaggagagcttaaccaagctttaaaggaatattctcctgaagaaaaggatgtcgcaaaagagaaaattgaaatgttctctaagtccccttctatcgagcttaaaaacgaaattatttctgaaatcaactcagcaatcgctcgatccttcatcgctgaacgctcaaagaaacaagcctctgagactaatagcaaaaatttcgatatttattcagacgttcgtgattctgggcaacaaggttcagtgacaattgatgatctttattaagataaaataacacttttataaaatttaggaggaatactcaatgttcaaattcggaacaattggtgcttataaacaagtacgaaataatccacgttgcaaggctagtgtcgatttagtccctggtcaagtcgtaatccctaacgattcttctggtaacgcattccctccaggcgcatcttcaactgcaaaaggtgacgtgtatgtggttggaaacattattgataaacctgaaattcgcaataaagaagacttcaaagtcctaaaaggtgaatatgtccttgcatttaatttagcagacttaaaaggactgccaattgaactcagctcagacgtggtagttgattatgatgcgcttgttaaagatgacgtattggttcctgctgcggacaaaacaggtaaatgggttaaagctggcgatgacgttgcggagtttaaagtatctctaaaagtcttagagaaaaatacatttggcggaaaaggtttgtacctaacagtacaggcttaattaatattctggaggtaattattaatgtttacagttgaattaaacaatgttcaaaaagactcaaaccattatgcaaatgctaaattgaatgctaagtcccctattgtagaaatcttttctgcagctgcaacgggtcaagatctttccaaatttggcgcaaaagccgatgcagctatggcccatgtgaaggaactagcttcaaaagctcttatgggcaacccagtagctaaagccgagatcaacacaattgttcgttatgctattgagcccaaacttatttcagcaattaagctatttgattttatgggcacgtttagaaatattggttatgatcagcaaccaatgatgacaacatacgcacatgaatccatccgaagccaattccaagcatcccgtggtgacgtaccattcgctactacaacttggagcgaatacccaattggaacacaaaccatttcttctggttatgctgttaactatcgtgagattcaaagtggaaacctcgataaagtagccgaaggcatggagcaagttcaaacagatatgatgaacaaagcaatgtactatgtagtaaacgaaatgttcaatgcaattaaaaatgcaacaggcgttaaatactttgctgaaaccgaaggcattactaaatcttctgtagacgatataatcacaaagattcgtcgatttggacaaccttctattgttggtgatttctctgttgtttctcagctaaatgactttgcgggattccaggctgtagccggagatgcttcaagcactaaactcccacagtctgttatggatgaaatccgaagaacaggattgcttaacacttataaaggttcttctgttgtagaattacctaatgcttataatcttactgaattaaataaagccggcgacaacttcaaaacatatcttcctgaaggacttctcttcttcattcctcaaggtaaaaagtctcctcttcaagttttccaaaaaggcggactcacatcaatgaatggtaacgacattatcactggaactgagatcactcgttttgatatggaaattggagctggtgtagcaaaaggacaagaacatcaaattggtctcatcagagacacaaaatatgaattaccacaaatttaaacaatttaaaatctaggagggctgtgtccctccttttatttttggagggattacatgtcttttaatttagataaaaagatcacaattaaaaacctatgtccatgggatttatatttccgaaagattgacactcacggagacttcagattaccagccaatgggattagacagattacagctggagaagtgcaatcccaagtctatgacaatacctcgctattcactggaactgacggtcaaggtactcatgccaaaatctatattgatgacaaagaaacccgtgtgcacttaggttttgagaccgaagataaagacgacaagcaagaaattgttactgttgaacgaattaaacaaatcttaggctataaaacacaaaaagcctttgaagaaaatgttcaaaaggaaatcttgcttgagtctgaaaaagctcagctgtttgatgtagctaaaaaagaaaagattaatgattacgctaagattaagttcattgaagaatacactggatttaaatttgatactcaatcataagggggttaaatcttgactccttatgaaaaaataattaacgttttccactcaatgtttcaatcaaatgaaattcttcccgatggccttgagcagcagtttttcattaacgcagttggtgaatacgaaaccgaactgacagaacttggttatgatgaaaagtccaatacatttaaatatccccttacctcatcacaaattcaagttttaggaatgcttatgtacaaaggattctctttcagatatcgagacagagccttaaaattaaacaacgttgtaggaagagatgttcaattgacaggtttatctaatactaaagctcaggttaatagatcctatgaagatcttgtcgatgagattgaaaaaaaaatgagcaaactgaaagtgaataattttgattgaggtgattaggtgtctgtagattggtatctaacctcttcttcaaattatttgagtggctgggaaaacgaagagtttaattcaaacaagtatgaaatcttcaaggaaatcttagcgaattcacctgaaacttacgatattgaattgaatggcaagcctgaacaggtaataattcaaaccactcaggacagtgaaacaaaaaaagtccttacagttttaggcttattaaatcgtggagacctgattttatatgacggtagttattggttagttaattcacgccctaccgataacaaaatgaatgacagtgctactatgcggctttgtaattcatcaattagtctaacctcttctgataaactaattgattctggagagattgatgaagttacaggaagaccaataaagattaaagtccctggtgataaggttgacatcccgtgtgtattagaacgaacaacctcaacaattggatcagaattggctataaacattcctgaggggcaagcacatgtcaccatcccctttttaaaacatgaaaaattaaagaagggtctttttctttctttttatggcgaggaattccgtgttgatgatatagactattccaaggtctatggagacaccggaacaattagacttatagccaaaaagaaagttggaggtgatagcgaatgagtatgatggtcgaacatatgacaactgtattcagaactattatgaatgatgtagaattgaatcgtcttttatattataaagatgaccctctctcctcttctctccctgacgttcagacgttggaaaattattatgatccagttgatgattccccatcaatattaagctcaataattaagcgtgctcccaaaactgatgatttaaccgatcaaccaatatgcagactttgtgtttatcttggcaatggaatccctaaaccctcaatccaaagtgtgatgctgctagatcaagatttgatgattgatgtttatacacacattaacacctatgaagagactgaattcaggaacctgaaaattactgatcgtatttgtgacatgctcttcaatcaaaattttgctggtatcggtaaaaatattaaatacacaagactgctcatatcgaacgcacctgaaggctatttgggatacaaattaatattcactttcggagctatgaaatgattgatatggagtttttcattactggagaacctgtctctacagaacttggtgaatgcagattcattaaagttaaagagtacggtcagttagccaattatctaaggctaatcaaaatgtccaaaaaagagatcatttatgtttataacaaagaagatgttaatcgtttcggggaacttgatgagcttgttgctgaattaaaaaaaatgactctttatgaaatttcgggtacccttcctaattttcaagaagcctatagcacagtgttttctaaaatgttcaatggagaagaaatactggataagcttactccagacaacttcgattccattagagaacttgtattaaaaatgtgttgtttgaaggaagaaaaaataagctccaatcctgaaattcaaaaagctaatgagcgaagcaaaagagtcaagagtcaagatggtgattcagttgatatggcagatatcattagcacagtgtcgacttatacaggctacctttataaagacattaatgacatgaccctgtttcaactttatatgacttataaccggattgctcaattcaagcaatatgacacttccacactctttgctacagtttcaccagaagcaggtaaaaacattgtgaactgggataaacacattgacttatttgaggaagagaaacattacataagccgagataagtttatgaaagagaccaaaggtttttctaagggcagctaaaagctgttcctttttttattttaaggaggaaatctatagatgaaaacagttattcaagatacagctgatgtttatttcagaagaaaatctgatggtcagcttgtattcacagcagaagcacaaacagcttcattctcccaagccatctccgaagaaaaacttcgtggtggtatcggaaataaaccactttatatcttgaagtctgaaaaagaaatcaatcttactgtcaagaatgcatatttcgacttagagtggttagcaatgacacaaggtgaaacaattgaagaagaagcaaaagttcaggttttcgaccgtgaacatggtctaattgttgatgacaaaaatgcggttacacttaaaggtaaaccggtaagtgatgtaaccttcttcaacaaaagaggtgttacgtacaagacacctgtgtcaacagatggatcttatttaattcctactggatttgctggcactaaagagaaattaactgcagtgtaccagattaacaaaatcggtagacgcctccctattaaagcgagcaaattctctgagcgatatgaagttgaataccgtacaattgcctataatcctgacactgaagaggtttacagtgatatctacattcaattccctaacgtatctccttctggcgaatttgaaatgtcgctcgaaaacggtaatgcattagcaccagaaattaaatttgaagcactggcggatactgacactgatgagatggctgttgttattgaagcgagtagagaaattaactttgtcaaagacccagatcctggatctgatacagaaacacaaactaaatccgtagacgttggcaattaattttacaggagtgatttttaatggcagcaaaacttaatgatttcgatggtgtaaaatcttcagctagagatgatggaaacggtggtttagtaactgacattcatctcaaatcacaagaaaagcctctacaagttgacttccctcaagctggtttagatgctatcaaaggcatccaagtacaatccccttccgtgaccttgaatgaaagagatcctggtttctcctcttttaaaacggataaattcactgttacttcaacagctcaaaaagttactgcaggcatcactgacagaacagcacttactatttatcctcctgcagaaggcacgatttacattggaaactctactgtgactgctgatacaggtatcccattgacagctggtgacaaacctttttcagttcctgtcgctgctggtaaaacactttatgtctatgtgattaatgacggtactgacagagatgtaagagtgtttgaagctaaataatttgaggggattcttcccctctcctttttaaataaaagtcagtttttaaacagatttaggaggtggagttgttgacagaaaccgatgcaaatattttaaaaaccattccagataaagcaacctttacattccacgaagcaacaactgccccgtctgaaggtgaagaatttgtagtatcacattatcgggatattactgttaagatctctggttcctcaacttcaagagaaataaaattctttgccgtagatgaaaatggtgaaaagacagaaattgctggaacaaacaaaactgattttcaattaggtacgggcacattgaatacaaatgaaatctgggattttgatattgcagggcttttcaaattcatggttgaggttgtttccgtaaatggagatgtaacgattaaaggaattgcggtgagttaatgagtagtagtaaatttgtaggtcagctcaaacaaaacaatgagcaaattaataatcttaaagatcaatttttcagaactgaatctcacatgtctgatcatgaaaaacgcttgaatgacaaagttgatgagttcatggagaagcagaatttcgatttaaaaatgcacattcaaaacaatgcgaatccacatcaagtcacaaaagaacaagtcggattatcaaatgtaatcaatgaagagcaagccacaaaagtagattttgatagtcatcttgacgataaggaaaatccccattcagttactaaaagccaagttggcttgtctaaggttgataatgtacagcaagcaacgaaggttgattttgacgctcacaatgcagacctcgatcgacatatcacaaaggatgagcgcagttattggaacagctccgatgaaaggacaaagtcttttttagctgaacatactaacgatcaatccaacccacacaaggttactgctgaacaggttgggcttgggaatgtagacaatgtaaaacaagctactaaaagcgactttgataatcatctgaatgacactaatgtccatatcaacaaacctgatcgggataaatggaacgctgctcaacttttcaaactcactgccgatgatggaaaagtaatctacaaagacagttctgaaaaaacggaatacaacgatttgattaccaccgggttctatttaatcgccaaccaggggctacactcccctgctaacttgtccaatgtatatttggttgtcatgaattatggtgatacaatagcccaatttgctttagaagcatattacggaactcatagttatttccgatttagaaagagtgattcaacttggacttcatggcaaacacatgaaacgaccgacggagcacaagcaagagctactgctgcactcaactcagctaaaacctataccgataccaagctttcctctccgacatggtacactcctactttacaaaacggatgggttaattacactgatgctaactctacagatcaaacagtgtttaaaactcgatatacaaaggatgctacagggactgtttttgttgagggcgctatagcaaaaggaacaattggctttggagtggctgcattcactttgcctgaaggatacagacctggaagagcgtttcagtgggttggtgtagcttcccaagcaggaatgtcaggtgtcccgcaaactcacagagcacttattgacactgacggaaaagttattatagaaaatagctcaaacacctccaaacccaatgattacattagcttaggctttagttttaaggccgtgtagggagaatattatgatgcaagtatacaaatatgacgaaaattatatttacgaattccctgttgtacttgaagacgatagtccgcttcctgataattgtactactatagctccatccgatggtctttatattcctaaattcagtcctaaaacgaaaaaatgggttgagtccgcctccaaagaatacattgacagtttaaaaccccttgaccccgaaccatcggaagctgaaaaagttaaaaaacaattaagtgatttaacatatcaactaatgatggatggtgtactttaaatgaattggtatgaacttataaaagattattacaacgatggtaatggtgtctgggatgaataccgagtagcgcaagctgtagtaaaagggaaaattacacctgaacagtacgaagaaattgttggaaagaaatatattgaaccaactacctaattatgataattttaggttatgaaaacaataaattttataacattcatcagtgctttagtcttgcttggaggatgttcatttaacgaagtagaaacatcagctacgggattaggaaaaggaagcagtaaacaatacgagccgttaatgattgcacatcgaggcgcatcagaaattgagccagagcataccttactctcctacgaacgagcaataaaagacaaagcagactacattgaaattgatttaagacaaaccaaagacggtcatctagtcgcaaatcatgataagactgttgatcgaaccacaaacggcaaaggagaagttgaggatcttacattagatcagattaaaaagctacgtactgaaaaagggcaaaagatattaacgattgaagaaatcattaaaaagtttggacaaactacaaactattatatcgagactagaacaaacaacaaaggcaaattagtaatggagaaaaagttaattgacatactctctaaaaataaactaatcgctaataacaaagttgttctagaatcatttagtgacaaaagtctaaagaaattacataagcttaacagccatgtgcctcttgttcaacttttaaaagatgaagacgtaaagaatatgagcaattcaaagctaaaagaaataaaaaaatattctaatgttgttggccctaatgccaaattggttgataaagattttgttgagaaagtccacaataaccatatgaaagtacatgtgttttttgatactgataaagaaagaacattcacttccaaaatgcttaaattgaaagttgatggactatttacaaataacccagcttatacagagaaagttctaaaagaagattataaataaaatacaagttttatttagacacctctcccctattgaggtgtcttttttaatgtgtgcagaggatatataaggaggaaatgagatggcatcgaaaaaattaaatcttgggttaatcgaagaaagtgtaagtaaatatgacaagaaagaacgagtgcaactaactgatgacgttcatgtttttatttacccttacttctcccctacccgcttaaccaaaatgcttactgaattaattactgatccacaaaatgctcaagaaaaaaacattgactttaaaagcataaatcctgttcaatggggattcttttcactaattaaagaatttacagacttgggtattccaagtgatatcaaaaacaaagtaaagtggtttgttaagcttgtggactctgaatttttcccattgattatcagtagtttccctgaagaaagcatgaagaaatttagagaagcaacaaagatgatgcaagaaaatttagacaaactgtcaaacatatctcaagaagaaataaatgatcttatccttaataaggtcgaagagattgaaaatgaacaagaggctgaataatggccaagaatataaaagatatagcagcactaattgaatatgccgcaaagcaagccgttcaaaaacaggcaaacacaaaaaatacgctgattaaaacaggtcaagagcatgtgcaatctgatgtatatgacacatacgatcctcttgtatatgaacgtacttctcttttgaaggactcttttgtcattcaaaacgaatctaacggaatttcattagacaatacccgtgaagacaacggcaaggatgttgctacggttgttgagactggtcaaggatacacatatccagataaatacggttatggttacggaaaacctcgcccatttatgaagaatactgctgactccttaaaagatggacgattagttgctactatgaaaaaagatttaaatgcaagtggtattaaaacagaataacggtggtgtattaatggccagagaaataaaacaaaacatgatgcgctctagagccgaaaagttgcccgaagtcacggatgaaatgtggggtcaggttgatgacgagcatagaagcttaacacaagaatttcttgatgcccactcattccgagataaaaccaggaagcaatacaactcctctcttcgtcagttcttctggtgggtgcataattccttgaatgggaagaagctttacaaaatatccaaaagggatttcatcagatatcaaagcttcctgaaaaatagagggatgtcttcaagtggaatcgctttaaaaaaggctggagtatcttctttaaataactatatcgagaatgttgttgctgaagatgacgataattataagtcattcaggaacttcacaagaggtcttcctgccatccctaaaacaactacgtatgaaaaagtaaaagttacttacgatgaatacagaacaatgatgaaagtgcttgaagaagataagaactatttggggatggcttggttagctactgcttttaatgtaggtgccagaagagctgaaattattcagtttaaaaccgaaatcctgaattatgagatacctgaaggtcaatcttatgtcatggctcacaaagttcttggaaaaggaaaaggcgaagggaaacccctcgactacatgattaacacagaagctctggaatatttgaagctttggcatgaacaacggggatatgaccatgagtatctatttactacacagtacggtggccaaccaagacaaatgtcagagggttgggctgactatttttgttctgatgttctttctgatatcctcggccgccgcattaaccctcacctctttaaagcctcctgtattacttaccttcttgaagtcaagaaaattaagattgagctcgtgagtaaatatgttgcacagcataatgatgtgtctacaacaattaagcattacgaccttcgtgattttaaagaagaaaagaatcaaatcttctcgtaaacattatgagcctcttcaatcctcaccaaagttcaattgagaatatgcaacagcaaattaataaattgaacgaagctgttgctgaattaactaggcagcttgatgctaaagctgataagaaccaattcggatctaaacagattgatgaatccaagatcagtgatggtaaagttcttgtttacaacgcaagcaccggtaaacttgaatacgggaagattaagaaaagcttgttgggtgacatatcaattgatttgctttaggcagcactctttatgaaatccctcttttatgcagaatcaagatccttctaccgaagggttttgcttatggataaaaccttaaacttatttccatatttgacgataatatggagaggtgaaaaatatgaataagacaatacttaaacacaatttagtacagatgaatagtcgcgacctgatcaaatacatacaaaaagaattcccgcactctggtgagccctacacagaacaaaagcgcaaatttcaaatcctaaaatcgcttaattcatcagatttaatcttagctatttcccgtatgagtcgaattgaagcgtccttcgatcatacgaaaatgtggacagttggaagtgtgctcataggaacatgtttactatctctcagaattatgtttagttttaatttgctttggtatattctaatcgcaacatcgatttgccttctcctactttttgttgtacgaaaggatagggacattgttattactgctacatattttaaagaattacttgagcagattaagtccgaaaaaggaaagtgaccctcccctttgctagttctacacttttggaaatcatgatataatgtaggaaaataatactggtggtggttggatgggttataagattatggcttatggtggctattttttattcagccttttcttctgtttaatggatggttggaaacctctgggagtttgcttgacaatcctaggcttacttatattagctactgaaccgtacaggataaaatccgcagcgcttgcagataagattaaaaaaaatgctgatatgctaaaggtctacgatagcgaatttaatcctgataatttctttaccacttataaaaccaaaattgcttacaatgaagataaagctatccttaaggtatatcagcttaatggcgaagaaataaacgagtatgttatcccttttgaccaaattattcaatctgaaatctcactggatgatcaggtgatttcgaaggttgccaaatcagggattattgctggaggattattaggtggtggaatcggtgcagcaattggcggtttgtcagcctcctctactcaaacagaaatggtgaagtcaattacgcttaaaattacagtcgaaaaccttaaaaatcctatgcactatatccacttccttccttctcgtgaggatgatggatatgaacctcaaggttataaaaaagacggaaatataattcaacaggctttgaaaaacgccgaatattggcaaagtgttatggatgtaattattaagaaaacaagtacagtcgctcaataatttgagtggctttttttatttgctctgattagccccacttgaaaggatgtgacttatttttgagtcaagatttaaaaataatactgaccccaaaagctgatacctcctcaaagactgtcgaacagttaaatcagcaaattaaatctttagagaaaaagcttaattcccttaatttaaagaccaatattgatgcctctgctttaaagactcttaacgaattctcctctgcagttgacacttaccaaaaacatctcaaatccttcaatcaaacagttaaagaaactacaacgattaccagaaatgctgatggcactgttgaaaaactaacgcagcagtataagaaaaatggcgaaatcattcagcgtgaaacaaagaccatagacaatcgcaatcaatcattacgtgaacaaacgcaagaagttaacaggcttgctcaagcgactgaaaaactaggtcaggtacagaaaagaacagaacagaagaattctcaaggacaaacaacgagggttactcaaaagaaccgtaatggctttgacgatattacctatacgactgatccaaagacaaatgctacgtcgtcaaaagttataacaaattacgatcagcaacgaaaagcaattgaacaactaaagatagatttagaaaaacttagacagcaaggaattgtaactgacaccaccctctcttcccttgggcggaaattaaacactgctcaaacagctcaacaaattgaagcattacaaaacagaattaaaatgctcgatgataagtctgctgctgtggctaaaaataatgaactccgaaaaactattgagctttatcaacgccaagcacaggtaaacgtacaaaaccttaatacgcgttatggcgatacgatgggcgctggaaatagacaagctatccaagaatatctgaatgcagttaatagtcttaacgtaagtgccggcggcagtaatatcagatctcaaatgcaaagtttgaacatgcaattcagggaattagcttcaaatgcgcaatcagcagctagtcaagcctcttctttcggcgcggagctaacacaagctttcaaaagcatgtctacatatttaatctccggttctttgttctacggtgctatatctggactcaaggaaatggtatctcaggcggttgaaattgatactctaatgacaaacatcagacgtgtaatgaatgagcctgattacaagtacaatgagcttcttcaagagtcaatcgatttaggtgacacactttcaaacaaaatcactgacattctccaaatgaccggtgatttcgggcgtatgggcttcgatgaaagtgaattgtccactctaacaaaaaccgcgcaggttctacaaaacgtctctgacttaactcctgatgacacagttaacactttaactgccgcaatgttaaacttcaatattgcagccaatgattctatttcaattgcagacaagctaaatgaagtggataacaactacgctgtaactactcttgatctggccaactctattcgaaaagcaggaagcaccgcttcgactttcggtgttgaattaaacgatctgattggttatactacagcaatcgcaagtaccactcgtgaatcaggaaacgttgttggtaactcacttaaaactatttttgcccggataggcaacaaccgaagcgcaatcaaagcgttggatgaaatcggaatttctgtaaagactgcaggcggagaagcaaaatctgcgagtgagttgattaatgaggtagcagccaaatggaacacattaactgatgctcaaagacaaaacacctctattggcgttgcaaatatccatcaattgtctcgatttaatgccttaatgaacaacttctctatcgcccaaaatgccgccgcaacagcttctaattctgcaggtagcgcttggagcgaacagcagaaatacgcagatagcttacaagcaagattaaataaacttcaaaacaatttcactgaattggctatagcttcatcggatgcctttattagtgacggattgattgagttcactcaagctctgggttctttgttaaaagcatctactggaataattaacactgttggtttcctcccccctctttttgtaacgattagcaccgctacattgttactcagtaaaaacactcgaactttagctactactcttatatttggctcaaaagcaatgagacaagaagcattagctagcatcggattagaagcaggtatgacccgcgctgctgttgcatcaagggttttgaaaactgctcttagagggcttctggtttcctcagtggttggtgttgcatttgttgcactgggctttgctttagaaagcatagtttcatcttttgcagatgcaaaaaaagctaaagatgattttgaacagagtcaacagaccaatgttgaagcaattacaaccaacaaagactccacagacaaactaataaaacagtataaagagcttcaaaaagccaaagattcaagaaccctttcatcagatgaagagcaagaatatcttcaagttactcagcaattggctcagacattccccgctttaattcaaggttatgactctcaaggaaatgcaattttaaaaagtaataaagctttagaagaagctattgagaacactaaagaataccttgaacttaaaaagacggaaactaaagacagcgccaagaaaactttcgaggacgcttctaaagaaattaaaaagtctaaagatgagttgaagcaatacaaacaaattgctgattataatgataaaggcagaccaaaatgggacttccttgctgatgatgaagattataaaatcgccgcagataaagcgaagcaaggtatgcttaaagcacaatctgacatagcaagtggaaatgcaaaggttagagacagtgttctctcaatcgcccaagcatacagttctatagatatcagcaatactttaaaaacgagtatcaatgacattgtaggtaaactcactttaaaagatgatttgaatcctgatgatctcgataaattctcttctgcattgggtaaactccaagagaaaatgcaatcggcattgaattcaaacgatgaaaaagcatttgatagcgcgaaaaaggatctgcaaacccttttggagacctattcaaaatccggttcttctattgatgtctttaagttgagttttgataaggcacaaaagaacattaaagatggagataaggccatttcttctgttaaatcggaagttggtgatttaggggaaactcttgctgaagcaggtaatgaagctgaagattttggtcaaaagctcaaagaagcacttgacgcaaatgatatcagtcagattaaagatgtaatcaaaggcatgtcagattcaatgcagtttgactctgttcaaggcattcttaacggggatatttttaataacaccaaagaacaagttgctcctttaaacgaacttttagaaaagatggctgaaggaaagagcatttctgccaatgaagctaatgctctaatccaaaaagataaagaattagccaaagcaataagttatgaaaatggtgttataaaggttaaccgagatgaagtaattcgtcagcgaaaagttaagctcgatgcatataatgacatggttcaatatagcaataagctaatgaaaactgaagtcaataatgccattaaaactttaaacgctgattctttacgaattgacagccttagaaagcttcggagagaacgtaagctcgatatatccgaggcagaattgtctcagcttgaagttaaatcaattaataatgtagctgatgcgaagaaagaattacataagcttgaagaaaaaatgttgcaacctggtggattttctaacaaccaaatctctgcaatggataacgttagagctgctcttaaatcgtatatctcagcatcagaagaagctacatctactcaggaaacaaacaaacaagcgttaatcgaatctggaacttcccttgagaaatggacagacgagcaagagaaagctaatgaagaaactaaaacatctatgtacgtggctgataaatacaaggaagctctggagaaagtcaatgctgaagttgaaaagtacaataagcaggtaaacgactatccaaagtattcccaaagttatcgaaatgccctgcagaaagaaattaaagctcttcaacaaaagaaaaagcttatgcaggagcaagccaaactcctcaaggatcaaattaagtcagggaacattacacaatacggtatagttacctcttccctttcctctggttcatcttctggtggttcttattcttccggtggcgggtcttactccggtaaatactccagttacattaattctgccgcaagcaaatacggtgttgatccagctctaattgcagctgtaatccaacaagaatcaggattcaatgcaagagctcgttctggagccggagctgctggtttgatgcagttgatgccatccacagctaagagtttgggtgtaagcaatgtttatgatccttatcagagcattatgggtggcacgaaatatttagcccaacaactaagcaaatttggtggcaatgttgagaaagcacttgctgcttataatgcggggcctggcaacgtaattaaatatggtggagtccctcctttcaaggaaacacagaattatgttcagaagatcatgtcaaactacaccaagtcaatgacttctgctaattcctccattgcaagctactacacgaagaacagtgcgtttagaataagttctaagtatggtgcacaagacggtgcgtaccgatcaactccacataaaggtatcgacttcgcagcaaaagctggaaccgcaattaaatcggttcagagtggaaaagttcaaattgctggttatagtaaaactgccggtaactgggttgtcattcagcaggatgatggaaaagttgctaagtatatgcatatgcttgataccccttctgttaaagccggtcaaactgttaaagctggccagaccatcggtaaagttggtagtacgggtaattcaactggaaatcaccttcatcttcaaattgaggaaaacggaaagacaattgaccctgagaagtatttaaaaggtgtcggtacatctatttcagatgcatctcaagctgaagcagaacgacagcaagcaatagcacaagccaaatctgacctcctctctctccagggtgacattaattcagtaaacgatcagatacaagagcttcaatatgagatcgttaagtcgcatcttgatgaatatgacaagcgcattggtgattttgatgtaagaatcgctaaagacaaagccctcgctagtcattatctgagcgatagtaaagagttccgtaagtatacaaacgatcagaaaaaagctttaactgaacagcaaaagattcagagtcagaaggtttcttttattgaaaaagaaatcaaaacaaacaaaactctgaatgccgctcaaagagcacagcttgctgaggaattaaaacaagctaagattgatctcatcaatttccaagaagaagtaagagaacttcagggacagctcatccaatccaaagttgatgaaacgcttaacggtatagagaaatcaaccaagaaaactgaatccaagcttaaagatgttagcaacaaaatatccatgaccgaggaagataaagacaaggttaaatattatagccaacagattaagcttattcagcagcaacagaatgaagcgaagaagtatatcaaacagttggaagcacaaaagaaagctgctaaagggttcccggatattcagaaacaaattactgaagagatcgagaactggaaagataagcagaaggattacaatctggagctttacaacacaaagaaatcaatcaaagatgtgtacaaatctcttgctgatgaagttgtctccatctataaagagatgtacgaaaagatgcgtgatattgaattaaaagcgcaccaaaaagcaacacaagacttgattgatgagatcgataaaactgacgatgaagctaaatttcaaagacagttaaaagagaagcaagagagtatccaaaaactcactgaccaaattaatcagtattctcttgatgactcagaatttggtaagtcaaaggttaaggaattaactgagcagttacaaaaggaacagttagatttagatgagtttcttaaagatcgtgaaagtagcaaacgtaaagaagcgttgcaagatcagcttcaaaaagacgaagattcaattaacaagaaatatgatgatctcgtcaatgatgagcgtggatttaaggaacttgagaaaaagctaatggatgggaagattactgatattgctaagcaactgaatgaattctctaaattcattaacagcaatatggagtccattggtaaaagtatctctaataaccttatcgataagcttaaagaagcttctaatgcccttaatactgtgaccaaaggcaatacaacaggcaaaaaaatatcttcatttgaaacaggaggatacacaggaacaggtttaggtgctggcaagcttgctattcttcatgataaagagcttattctgaataagactgacaccaagaacatgcttgaaactgtaaagtatgttcgcaatctgtctgataacgatctgaataatgaaacacctaaatgggggcaaggtggaaaattagcagctttgattaacaaagggattacttctattccatcaataattcctaatattaaccaagcgagcctatctaatagtttgataccaaatgttaagactgctagcctgccccctaccacaaccgttaattctaatggtgataaaacaattaacacaccaataattttcaatgttgataaacttactggtggggaaactggagccagaacaatgctcgaaaccatcaagaaagaagttataaaattaaatggaagcatgtaagggtctgtataatgcaggctcttcagcttgctttttgattggtaagggtggaattttatgattagagaaagtcaatatttcatgttcgatgatatcccctcttatgaaattggggcagtgaatgtaaacacagagggcggactattggaagagaccttcgtagcgaatagaacagtaaatgaaacatatacacgatcagcttctgaaccgtatgtggacagtgttaaacgtgaaccatatgaaatccctttaaacttttacatagaagatcatttagatgaagaaaatattcgaagagttgcacgttggctaaatgtagatgattataagcctctttcattcagtagtaatttagatatcatttattttgctttgccagtgaatgcaacagatttggtacacaactgctctaatgacggatatgtgaagctgacaatgaaagtatttccttataggtatggacgagaaacaactacccattggtatgacatatcatcaggttctaataatatagaaattaaaaatataggggatttagatatcccactctctcttgaattcaaaaaaatcggtgatggagacatcacagtcgaaaacttgacagcttataaagaacctctaaaattcacatcaattaaacatcaagaagttattaatgtagatgccaataaagagctgatcacctccagtgttactgggtatgagtgttatgatcaagtcaatgaacagtatgtttttttaacaagggggataaacagagttaaaataacgggcgaatgttgtatccggtttatatacagatataagtatttgtaaggggatgttttattgatttacgattttaaaccaggccatctcaagctttctttagcaaaaccaaataaaaagaaaatcgctaatatagtagatttctctaacgcctctctaaatttgaattttgatgaactccacgatctaacttttaatatcccacttaaagcaagatataatttcaagatgaagccaaaccatgtggcagaactcataaaaggctggtatctcattaaggcagagttcttaaacagagttgaatggtttgtaattaccgggttgacaaagtcagaaaatgaggaacaaacaatacaagttagagctcaaggacttccctacattcttcataaaagcaaaatcaaatcatatgaaggcatctctaaaaatctgttggaagttgccacagattgtcttaaaggaacttgctttactgtagactttattgacccctcttttaatgaaaaacgccgctcatttgatgttacctctacccgatatgagtttttaaagaacattggagaaacttttgaggctgtgcctatatttgatactgttaacaacacagtatcattttataaaaaagaaactgtgtccaagtataaaggtgtccaattctctcctaaaaggttcatgattgatatggaagataccattgatattgatgaagttgtaacacgattagacattaccggtaaagatggaattgttattaattcagtcaatcctactgggcagagttacttggatgatttctcttatttcctctacccttttgaacgtgatgaaaagagaaatgtaattaagcatagtgattacatggatgatgatttgtgccatgcaattttagattacaatgaacttgtaaataaagaaggctcttctttttacctccttttaaatcagaaaaaagatctggaagcaataaaaacaacacaggagaataccctcttcaccctagaaaaaattgaattacaacaaatcttagataagatcacagtagcaaaaaaagctggagatgacacgaaagaccttatcaagcaaagagatgtcaaacaacttgaagttacatcaaagaaagctgaaatatccaccactgccaatcagatttccaagataactgaagaaataacagtgttaaaagatcggttatctatggataagtttctcggtgaaaagctaatgaaaaagttgtcttattttatccgtcaagatgattggtctaatgacaacatttttgatgaaacagagctgtatgaaaaaggccttgaggaacttggggagaaaaatacacctccggtagacatcagaacaaacattgtcaacttatttactgtcaacaaagaaaaggatttttgggatagaatttacctgggagatataatcagattagttaatgacgattttagaactgatgtcaaagcaacacttacaggaatgaattttgattttgagcagcaaagtatacaagtaacactctcgaatggaaaaagagctactacgatagaacaagactttgcacgctcattgtatactgctaagaaagcatcaactgaattcaataagaaaaagattgattatgataccctactgaccaattacaatgcacgaaatgatcgtatatctgcacccgtagcaaacccaactatccgaaatgacgggactgctataactcatgttgtaaatgataatggatctgtagatgtatcaattgaatgggattttccagactccgatgaggataaatacaatatcgatggtttccttatccattgctactctgacacatcagatgatacctatctttttggttcaaagatgtcagctgaacaatatttatcagttagttatgataaacgaattgcaacattaaccggtcaagtttcaaataaacactatacatttggagtacaagcctatcgcacagtagagacatccattgatagcagtggtcgaatactatctgatattgtacagcctaaatccccttcagaaaacccctacctcccttctaattctgttgaagtgaaaggaagtctaagcggaaaagttaacgggctttatacaatatccaccgaaacaaagcctatttcgccagatgcaggaacgatttggattgattcaaagactaataaacaagagctttttaatggtgaagagtggattgtgtcttctgcgggctcggctgattcattaaatggttacacgacttcaacgctatccacgcctaattcaatacctgtacgtaatgaccggggaatcattacaggttccatagatggaaacgctgagtttcttggcggtaaactacactcagaatatgcgctatcctctgatgttcctcagatagctaaaggaacgtatgtgggcgatggaacaattagcaaacaaatattgctgcctttcactccaacacatgtgaaagtgtggccagtgtctcctaatgattctatgctattaattgatgagacagggggttatacgtatcagataaatgaaataggaatatccctggttgggggaaactctacatacggaagtataaacgagcttggatttataacaggctcagacagcaatcaaagagggaataaattaagtacaaagtacatctgggaagcatataggaatgtaaactaaacaggcatatccttattggatgcgtctttttttatttcaactttctttctataaataaaattctactttatgcaaagacttgaccgttttcatacgataataccccttcttcacttaaaaataccttgtaaattataaaccattttaccacttgatcccatagcagaaattgtgtcatgatggattttggtatataaagtgtttaacagaaagagtgaggggatcagcaatgagtgacaaaaaatatgaatctatacactggtttgcgtcagtgctagcgtttttattaataattttgaatagtttttttataaaaattgagggtgtaactgttggtattgcgattgtatatatagtgatcatgggaattgttaggagtacatggaaaaaggcttaaagagaaaagactgcagagtttagaagagagagtcgcgcacttggaagaattgctccatcaattacacaataagaaaggacggtgaatttagtttggattttcctcagctctataacgaccctaccctttctcaaaaaaggaagggttcaatcgatgacccttatttaagttatagtgaaactttaactgtttacaatggtcgggccttacttactgaaatccctaatcgtgagtacagagttgtggttgaaggtgacggtaaagaatggcgagaaattgaagatggtgaattagcagacaactactttaaggttgattaccttatgggcgttgtcttttttaatggttcaaacgaaggtaaatcacttacttttacatatcaaggagaaggatgcaccttctcccctgcctcaaggatttggattaaacggcaaggaaatatggtcattgaaacacttcaaggcttaatagatgatgctgaagatgccattattcgtatcaacgaacgaattgctgaatgtgaacgtgtcactaaacgatgtattgaaataacaaattggtgcagacaagcaacatcagattatgagtatgtagttgagaacactagaaagatttacttgccgtttgtgtacacctatcaggatttattgaacacttatccttcccctcaaattggttggactgtcactgtaaaagaaacaggtattgaatatcgatgggatggtttcgactggataaatattagcgtctcagataagtatgacggtttcaacattgtttctagctatgtagagccttacaacatcagatctgtatggttgagaacgaacaatgctcccaaaaagatgagaataaaaccttctgtagaaccacctgacggaagtatggtttggattagaaaaggataaggaggagtatatattgaacgacaatttaattcccataaacacaatgggttataaggacgaagaaacagagcaatggatacccattgatgccatagggttaaaatcaaataatattagatatactgcagacgatatccaagaggcttttgataaagcttctaaggatattaaaaacgtaataagtacagtcgattctggcttaacagatatcacaaacactattggagacatttcaaaaatccctgcatccggtgcaacaattgttgataaagtcctaaatgaatttatcagacgaagtgtcaatgttcaggattttggagctaagggtgatggtgttactgatgacactgaagctttcaaagctgcctttgcaagtgggaaacgagaggtttttgtacctgcaggtatttatatggttcaaggattacatatcccttcttatgtcagactttacggtgttggatctgggtctattatcaagcttcacccaactgccgccggaacatcttgtgtgttaaccaatagcgactacacaaacggaaacgaatatatcttaattgaagacttagacctcgattggaatttagacaaaaaggacaacaccattacaaatggaacaaatgcaaactgtgtgggtattgttaactctaaatttgttcgagttagaaacgtcaatgctcgaaatccaggtgtgcacggttttgatgtaagctcccctgtttggaactcttcctctgatggagcagatcattatcagccaaatggtagcaaatatgtgtggattgaaaattgtactgcaactaattatggtgatgatggcttcacaactcactattctgattacatcttcttcactaactgttatgcttatgacgctaatgggtctgcccacgataaaggctcttcaaattcaaatggttttgaaattgatgatggctctaaaaacgtatggctggtgaactgttacagccgaaaaaactgtagaggatttgaagttaaagcgcacagcagagccccagcagcaagaaacgtaaatttaataaactgctactctgaaaacgatattcgctcatttgacttcagacacgttggcttccatcttgccaccgaaaagatctccacaagtgcattcgatattaatgttgttaactgtactgccaagtaccctatttataatgacctttatacagggttaaatccccgtgctcttgttatttccgcatatagaaatgtcaacgtatcaaacttcaatgcaattggcgacccagcctatgattacaagaacactcctattatcactactcaatataagagtagaaacatcaacctaaataacatttcagtttcgggatttacaacagcgagtaacgatatttatgttatcggcggagctcaaaagtctgacaatgtaaacatttcaaatgtcaccattcatcaatctgcattagtggggattgcggttgggagcagagtagactcagttaatatcaataacgtgaacctaaccggaacaaacaaagcaggttcgataggtgtttattgcactaactcacaagccaatattagcgctgcgatgtgcgaacaatacgctactcccagtaaaattgccggaaaaacctacacttttatcccgaataatttcaaaggcggtttacgcggggctacgacttctggctatgctaaaacaaatactagtgcagtattagcttcatcgggtgaacctcaagcacttggagatgctactttagttggagccactactggaggatgcgttgcaaaaggaacaagaaccaacgttttcggatcatcagggggaagctctgtagatggatctcgtagcggtgtttacaactccaatgattctcatatcgaggggcaaaatgtatcacgtgaaatccacgcttctggcggggtaaaacttggtgaaaatgatcgctatatggtggttggcggatttggcgctactccatccagagcgaatattaaatggatgctaaactccataaatggggatataacatctgcaggaaagatgaatggcggagccacctttagtgattacgctgagtattttgaaagccttgacggaaaagcgattccgacagggacaattgtcactcttgaaggagctaaaattcgcccggcgagaaaaggtgaagatgtacacggagtaatctccgaaactgcaggaactattttaggcggagctgatattcactggcaaggtagatatttaaagaatgagttcggtggatacatatatgaagatgtggtcaacccagaaaccggtgatgttaagaaactgcctaaagtaaaccctgagtggattgaaaaaatagattacgtccctcgtgaagaacgccctgaatggaatatagttggattgcttggacaggtttatgtgaaagtggacaacaccgtttctgttggagatcggattgaaggtaattatggcatcggcacaaaaacagaagacaggttttactcttggaaggctatggagattgtaaccccatattcagacaagcttggctatggcattgccatctgcttaattaagtaatccctcaaaattaaaggaggtggttatgttctagttaaaatataaattttattcaatttacagcattcaaaaacagagataacaagagcatacgtgagataaagagagattgggattcccccttctctcattttgtgttcttaaaactaagattattggaggaataatttttatgaatatcactcagaaccttttgactccgaatagttattcaagacctcgcactggtttgaataaagttaaagctgttgtaattcactgggttgcaaatcctggttctagcgctgaaggaaaccgaaatttctttgaaagccgaaaaagtggaacgaacggatacggatcagcacactacattgtaaaagagaacacagttattcaatgtattccaaacaatgaaatggcttatcatgtaggctcaaatgtgtatactcaaagtgcactgcgaaatcttagctcgtatccaaataactgcactatcgggattgaaatgtgccataacgatatgacaggtaagcctacagacgcaacttataaaacaacattagagctagcttgctccctattgaaaaaatatgatctgactcacgaaaatctttggactcaccatcaggttgttgggtggaaagattgtcatagatattacactaacaatccatcagaatgggttcgatttgtgcaagacgcttctaaaattctaactggtaaatctgtcacaattcctacccctactcctgctaacaataaagaccttgaagctcctgatgttaaaacgagagagtcatatattaagaacacagttatcgcagacagtcttaatgtgagaacacaacgcaattcaaactcctctatagtacttacccttcctaaaggctctactgttcaataccaaaaaggatcaactcaaaatggttggggttatatcaaatatacaaactccaaaggtgctacatatagtgggtacgtcaatgtaagttatattaagagtgatgctgagcttgggaaaggtggctcaaaacccaagacaactccatctaaatcacccggagtgacaaagaaacaggtagttcttcccgcttcagcttcttcttggagaatctatcctcttggcaaagccccagttaaagcaaacgctctttctactcaattgaatccaaaaaaatttggtggattaacctacgacattttagataaccctcaagcagacgtttacacaattaagactgatcagtttggtaaagtgaatatttatgccgctgcttcaacaggagctaagattgtgggtacgtcttccccaaagtctaaatccactcctaagcctaatagtagtggggtcaaatctgcaggcaaaattaaaattgtcggtgtaaaaagcgctgcaatcgttatggacagacccgataaaaacaaagcaaagaatctcggcactgtggagctaggtgataccgtcagcatttctggctcagtgaaagggttaaacaatgctaagggttactgggaagttatctacaaaggtaaacgcggctacatctcaggacaatttgggtcaaaaatctaaatatatttaaatatctttgaggatgattgttgatgaggtatatcaatgattatcctcttattataggaggtgatgtaatgtcacctttctattttatcaaaggttggtgacaaatggataactttgagcaaagcaccatttcaagattaagtgcacttgaagaaaaagctaagcacactgataacaaaatcgactctcttgaagaaagaacaaatgttattggtcgtattgctacgcttgttgagcagcaagtcgaaattaataaggattctcaagcacaatcgagagaacagttcagcactctgaacgaaatgagcaacagtttaaaaaatctaagtaaatcatatgaaaaactggacaatcgagttgaaatattggaacgctctgattctactcgcaaaattgatccttctcagtttactaaagaccttgtgtttaaggtgctaccaagtgtaattgcgtctattatcgcggcttggttactcatacattttggacttaaataaaaagaacaggagacgatttaatgactaaaattaactggaaagtaagacttaaaaagaaaacattccttgttgcaatcttttctgcaactcttttgtttgcacaatccattgcatctgcaattggttacgacatttctgtatttagtgatgatctcactgagaaatttaatgctttgcttacatttttaactgcaatgggggttgtagtggatccaaccactacaggtatctcagacagcgatcaagcaatggaatacacagaaccaaaataacttggggagtttgtctcccctttttttcattttcaagaagaaaggaatgatttttgatcatgcaaataggatctggatatatcggaagtccaatgcttgagaagtcagaatctaaccatgaagtaatcccctccccacctgcaacctggacgattaaatattctttctataagttcagcttttcgaatgatcaggaatgccacgtatcaatcaatggtggagatcctatctatttaagggctggacaaggctttcaaatggacgctcacgattcacctatcacaagcttcaaaatttctgagtcaggaattacatataactttttgggggcgcataaatgagttttttcaatccaatggttaatgtctcaattgtcactgggaagtctgcttatgaaatcgcagtggacaatggtttttcaggaactgtagaggaatggttagcttcactaaaaggtgaaaaaggcaacactggagctactggcgctaagggagacaaaggtgatactggtgcaaccggtgctaaaggagctactggtgctgccggtaaagatggaaaatcagcatatgaattagccgttcaacaaggcttcactggaacattagatgagtggcttgcttctctaaaagcaacagcaaactgatcatatacccttctctaacgaggagggtatttttttcgtttcgttcataatcgaattattgatttgtttttaattttcactcaaattccctttacatttctttcctccaatgcaactatataataaaatggatttgaaaggggtttaggacttggagaacgaaaaggtcattccttatgatttagtagcaacaaagatgaatcattggtatgtggctattaaaaagaattgggtcggtagagcagaagaaatgcgtaaagaagttatgcaggaaataaaaattatggaagaaaaccaagatgttttactatactactccctacttgagtttagacataagctaatgttggcatatatgtatcctaacgctataaaagacattgagaaaaattatggtgagttaaaagcatatgaaggccatgaaaacttaacaggaatgctcgaatattactattattttttcatgggcatgttctattttagacaaaaggagttggcattctcccttaatcactatagacaagctgagagatatttggattcaattgagagcgaagatattgaagttgaaaaagctgaattttattttaaattgtcagaagtgtattaccacatgaaacagacttatttttcaatgaattatgccatgagggcttacgatatatttaaaaagcaacctgttattgacggtaaccctacatacggggtacaaaaggtacgctgtcaattcgtcatatttggtaatttattggacagtatgaagtttgatgaagctttaaagcaagcatacaaagcgtatcaggaagcagtagagctaaacaaaagtgaaaagaatcgtgggcatttgatgcgttcagcactgtttaatattggattatgttataatcaaatggaagaacttgataaagcattttttcactttaataagtcacttcaaatcattgagccggtaaatcatgattacgctgctaaaacattatttgttatctccttcttaaagggaaggcaaaatgacattgaaaacacaaaaaaattttatgaacaggccaaacagttggctgaacggcataacaatgaaatggtacttgaaaagttaaaaatggttaaaggacttttcttggactatgatttagacttagttaggaaaacattcgagttcttcaaagaaagaagtatataccctgacatggaaagctatggtgtctctgtagcagattttctcactggaaaacaggatgcttggggtgcagttgaattttatcgtttagcaaatgaagcaagaagacaaatcaaaaggggagaagcaatatgaaaactaaactatttatctgtgcagttctattattcggcgttgccggaacagtgggtgcttcctatctccaacaacaaaatgatacgttcaaggttgctgaaagagccgaaacgtaaaaaactaatgactttgtaaggagaacagagggagttgctctctgttctcatgatttatgtccacccgtcaatcctgctctatgcaatgctgttcctccaggtgtataagaaacagctcgtaagatcgcttttgatccgtatttatttcttatcccgtccataacaaatccaagctttcttctcttctcattatctttttcaaacagacttaattgttgatttacatcatcttcaatattggataaggtaactgaaacacttcgtaccgttttgcctatatagaacttatcaaataacatcaagcaatttcgataaatatccattgtgatatttgtaggtaaatcaattgttttagctctgtgaaagccacccccgaactcatctttactataaccaattcctaagctgatcgtacgccctactttattatgtgtccgtgctcttcgtgcaacctcttcacaaatctccaagagaaccgcctttatgtcctctttcttcgtatagtctctaagtaatatctgacttttcccgtagcttatttgcccctgcatcaaaggagctccaatttcagaaaggtcgattccatgggcatgataatagtaggataagaacccgacgccttggcatattactatgctaggtttccaaatgctctcccccaaaccgtacgtacgcctctcagcgtatacggctttccacttgtcagtttagtttcccattgtgtaagtccctatgacagtctacacataaagcaagagttttcctttgtcttgcaatcatgtgttgttcccataaggtcttaccttttaagtctttaagttttctaacatgatgcatttcaatcgctacatctgcttttccgcagtattcgcattttttagcgctcaatctgtcgattagactcgttctcccaacataccttacgaaattcggaagcgtatcgcaccttatgtctgcttcattatccactcgtttaaaaccttctctatagaaataccttattttcgttcccgccttagttttataagcaatccccaacttcccattcagcctgaatcgactatatatgcttgcaacggacgccttatacttagccccaagggttctaagaaagctgtatttcataaaataatagaaatcattcagtgtgtgaacgttatgagcgagcttgtaatagttgtacattcctcggatttccgagttatacatgttgatgatttcaaggtcatcgtggtttataaggtatgtcctatgagcagccttccattttccatcggcggtgattttgagagctttatattcctttagtttattaatccacttttcagccggcatatagagtttacatctaagattttgtgttttcctaaggttcccattcttgtctgttttggtatgtgaacttctcttgatttgaatgtcatatcctaggaatctcgctttttttgaactgtttgtgattagtgtcttttcttgggacagatttaatttaagatttttatttagaaaaaccgtaaggtcttcctttatcttcaaacagtcctttttgcttccgataattccaactatgaaatcatcggcgtacctaacatattgtattcgtttataattcgtgtccataggatcagcaaaatcaacagctaaaagtttctgtttcagcgacttgtacgttctcagctcttctctttttctctctaaaggtagttcgtcccagcacgctttaagtttttttctgtgtttgtaaactagatactcacggcgcttgtattccttgtttgttgctctttttttggctttattgaaaccactagcatagtccctcaggtacttgtctaattcattcaaataaatgttagacaatagtgggctgataattcccccttgcggtgtcccactataagtggagtggaatttccagtcgtttataaagccagctctaaggaatttccatataagcctaatgaattttgagtctctaatccttttcgccagaatactaattagcgtatgatggtcgatgtgatcaaagaaagattctatgtccccttcaataaaccaccgcacccctgtaaagctgtgttttacttgtttaagtgcagtatgacaactacgattcggacgaaagccatgagaactgtcttggaacgttccttcatatatcgcttctaagatcattcgtacaacttcttgtacgagcttatcgtcgaaagatggaattccaagtggacgcttctttccattggattttgtaatataaactcttcgagatggtttaggctggtaagtttcatttttgagtgaatcaattaacgaatcaatgcgtttatgactaaaaccgtcaatagtttttccgtccgatcccttcgtcatgttacctggcttagcatatattttggcataagcctttaggtaaaactcaggattatagagattcctataaagacggtcaaaaacataattttcttctttagacttggaaactaaattgttcaacactacgtctggacttctcacagagcctcgcgctccttccaatgttgtattaaactagacaagctgtctcccttcgccatgtagcaggctttccctaccccagactactacggagactccgttaccttgtcggatattcaggatcgatatccatagcctatatcaggcattccgatttaggtaatccccatttagacatatgttgacatagctttatgcggtgtcggatgtgacgttcgccctttaacccttatcgggattgtccagtcattgagttgcttagagaaagctcaactataattcttcctccctatgactgtataacgttaatggataccttccgttatagacggtagttttgacgactcggactgtcattcaagcagtgtagctttcatccttatccacatatctcatcttgccattcagtcgtgacttggtatctagccaacttatgacttttccaacatgctacactccccgttcagtttccttcccggataagttggatgatgacagatcgttgcaacttaatctgttgtcttgctatcgacaaattcaaacatatgcccttatgggcgcacaagctgattgcccatgatgccgaagcgtttttcaagcagctctagtggatatttagctaattggccaacagttaatatccccatccggtttaaattcctctccatcctccctcctattccccacatttcagataacggatgaacacaccaaagctttttaggaacatcttcatatctccaccgtgcaatcccagtctttgttttcttgctctctaaatcaagagctaacttactcagtagcatattgtcaccaataccaacagtacaaactaagccaaactctctcttcatactgctctgaattgcttctgccatgacttcaggattttcttttcctgcatctaaaaaagattcatcaattgagtacgtgtgcacacatgtttcaggaacgaacctgtaaaacaatttagtgatttcagttgaaactctgatgaaaagtttcatttgcgggtttactatatgaatttttggatcatctggaatctcaaataaccgggagccagtcttgattccataatcttttttaagtgcaggagacgctgctaagacaacacttccctgtctatccgtgtttccgactacagcgagataacatgtcattggattcaatcccattgttacagccattcgctaaatatagcaagtgtttttttcattttatttaaaaacataattcgttatattcatatccgctgcggcataggatgtaatcaagcatggacaagataaggaggcgtcatcagtgaaccacttctacgtgtggcacatcaaaaggataaaacagctgcttattattatcattgccgcatttgcagcagccagcttattttatatacagagagccgtccctcttcctgtatttttaacggataacggtccgaaggcgatttctaaaggggagacgaaagcaaacgaagtcgcattaacatttgacatcagctggggcgatgaaaaagcggttccgattctgaacacgctaaaagcaaacggcataaaaaacgccactttttttctgtcagcttcttgggcggagcggcacccggatacagtggaacgaatgattaaagacggacatcaaatcggaagcatgggatacgcgtataagaactataccaacctagaggaccaagacattaaaaaggatatcctccgggctcagaacgcatttaaaaaaatggctgtaaagaatgttcatttactccgcccgccgaccggacaatttaataaaaaggttcttaccattgcacagcagtaccactattcagtggttcattacagcattaactcacacgattggacaaatcccggccctgataaaatcattgaaaatgtaaacagtcatataaaaggcggcgacattgtcctgctgcacgcctctgattcagcaacacaaacggaagaagcgctccccgccatcattcacaatttaaagcaaaaggggcttaaaaacgtgactgtcggtgatctgatcgcaaatactgacgtcaaatcatcagaggtgaaataactacctctgggcaaactttggcagcattaacagctgaaacgcattgcagcccatcagcgggatcagcatcaaataaagccagtcctcattattcactcttaacgcaggaacccattcaagcgctgtaataacgaccattaaaaataatgatgaaatgaacgtatttcttgaggactgcttttgttttatatatgccgtcaacaggcccacggcgagcaaagccagcggcagccagacaaaccctgcaatcgagtcatcccgctcaccgaaaaataaaaatctgacgtacattaaatcaaaagcaacaaacagaatgataaacagctgaagcagattccaaagcgaactcgatctgaggatttcaagggcaaaccggtgcaccgtcaaaaacacgaagaatcccatttgactgatcacactgaaaatcatgcctactccgataaaccagatcagaacggagaaaatctgtccggcctcaaaattcagaaagaaccccttgtactccccccacttcagtgcaaatcccacgacgcttgtaataagagcgcccacagctaaaatcgaaaagaaaaatcgaacaagcccgcggcttttcatctcttattcatccccctgacaatcgcgttcagcgatattttgttatgtataaatccattccgatgaatcatattaaaagtaagaacaagtaaggaaggagcttatgtatgtcaaaagccaaaacgctattgataagctgttttgttgtgttatctgtaacagcttgtgctccaaaagaccaagcagcggatatggattatgaccagactaaaaaaatggttgtcgatatattaaagacagatgatggaaaaaaagcaattaaggaaatattaaatgatgatgcgatgaatgaggcattggtgattgatcaaaacgccattaaaggcacgatagagaaaaccctcacctctaaaaaaggggcggagttctggaaaacgatctttgaagactcaaagttcgccgaaagctttgcaaaaacacttcagcccgagcacgaaaaaatcataaaaaaactgatgaaagaccctgattatcagaaaagttttatgcagatcttgcaggaccccggcatggataagaaatactacgagctggtgaaaagccaaaaatttcgcagttacctagaagatgtgattacagagacactttccagcccgcttttcaaaaagcaatttgaagatgaactgaaaaaagcggcttcaagctctgaaaaagaaagccaataaaaggccgggccgtattgatcccggccccttttttattcagccgttttttcaatgactttttgggcgatgcccatataaatttctccgatcggatggcttctgtcgtagacagaaggcgcaaactggtctttgtcccaatcaggctgctttaaaggaattctgccgagcagcggcacctgcaattcttccgcaagcttatctcctccgccttgaccgaacacaaattctttttcaccggtttttgcactttcatagtaagccatgttttcaatgacccctacaacttcatgatcggttttaattgccatagaacccgctctcgctgctacaaatgcggctgtagggtgcggcgttgttacgataatctctttactgctcggaagcatcgtgtgtacatcgagcgcaacatcacccgtgcccggcggcagatcgagaacgatatagtcaacctctccccagtcaacttcatggaagaagttgttcagcatcttgccaagcatcggtcctctccaaacaaccggagcgttttcttccacgaaaaagcccatagacatgacctttactccaaatctttcgacaggaagcagtttttctccttctactgtcggacgaacagtaatacccatcatgtcaggcacgctgaaaccgtatatatccgcatcgatcaggccgacttttttgccgagccgcgcaagagaaatggccagattgacggaaaccgttgatttgccgacaccgccttttccgcttgccaccgccagaaagaccggcggatttttcctattcagcagggtttcgctttcaggcgccggctggctgaatttcgccaatgtctcttccggcagctcttcaaaccgaaggccgacagtttccgctcccgcttctttcaggacggatacaatttcctgctgaatgcccatttgttcagccgtccccgtttttgccaatgcaatttttacactgacatgccgtttctccggcttgacctttacttccttaacggcatccaattctcccagcggtctatgaagaaaaggttcgcgcatttttccgactatatttcttacttcatcttctcttatcatcgaaccctcaccctttgtgtattcgtttacaaatggtattataccatatattaatcatagaatcggcgaaaaaccctccttactcgggagggtctcctttctctgtgaagtatctcaatacgcccttatacacggaagatgcgattttatcctgatatttaggctggctgagccttttcgcttccgcggggttggacaaaaatccgacctccaccagtgcgcccggtttggttacattctgcattaagtaaatgccgtgtatccgcttcgcctttctcgttgtattctccaaattaattctcaattcgtcctgtatatattttgccactttttcattctcttcgtattttccatagtaaaagctttgggcgccgctccatttcggtgacggtatggcgttcaagtgaatgctgatataaagctctgcttctgaacggttgatgatctccacgcgctttctaagatcttccgctttgcgtctgctgtagcctttcatcccttcaggcgctaagtcggtatccgtctcccgcgtcatgatgaccaaagccccttgctcctgcaaatagtctctgactctggaggccacttcgagcgtaatatccttttcaaggtgattgcttcccgtggcgccgccgtccggcccgccgtgtcccggatcgagatagatgatttttccgctcagcggcagactccacggccgccaggaatcatcattatggaattgaaaccggaataaacacaataatatgataaagccaagtaaaaaaccgagccatttcagcttatttctcatacctttccctcccgcttgtccccgttattaataagtatgggacatgggaagaaattatgattacctcatgcggagcttacattgttttttccgttgcagaaacccttccgtccaccagctgttgataaacctgcatgacgcttcgtagatttctttttgttcaacggaagaatattgctcatgcgtccagctgcaaagatattcaaaaaaatcgaccgtcagttcttcctcctcttcggacgaacgggcgtttgccctttgcaaagactcaccgtaatagccaaagacgccgaaccggccgcctaataaatacgcttctattgcaaaatctatgcacccttcacttagaatgccgttttcatcttggagaaagggaaacaaaggggaaagacatgcttttacggattgaatgatctgcgtcagtgacagctccttgagtaaattcttctcaagttcaaaatccttctgccgtttcacgtctgaaaaagataatacctctgccattgccattcacgctcctttttactgttattttgaaaggaaaaagggaaaagcatgctttgttgatagtggaaatcctcccaaatgaaggggttccatgtttaaagggcagagacggtgttgtgaaaatgctgttacagcacagtcggcaggtgcttgatgagaggctgagcggaatcacagacaagcgcgacccgcaaaaaaacagcacctctgacgggatgctgtttttatattttaatgcttcttgttacggagtatgtattaatgtattcatccaggacgaggccgcccttgtcctcataaaagccggtgaccatgaagcccgcgtcaatctggcccttaatttgatcctctaacgtatggccgaattccagcgcttcattattgtcaatgagttcctttacttttttcttactgagatccttttcatccgaaaacggaatggaatactttacttttaggacgccctcctgctctaaatccatatcaaataaaaacacgacgggatttacaaaaccggagactaaagatccgcctttttttaatacgcggtgggcttctttccataccgggagcaccgtatcaacaaagcaattcgatactggatgcacgataaaatcaaatgactcatcctcaaaacagctcagatcattcatgctgcctttgacagtccggagcgtaagatcttcccgctcagcaaccattctgtcttgcgcaagctgtttttctgaattgtcaaagacggtgacatcagctcccgcagcagccagcaccgggccttgctgtccccctcctgaagcgaggcaaagaaccttcagaccatcgatgggcgggaaccaatccgccggtacgtcttttcccggagtcattctgatgctccaactgccttttttcgctttgccaatcgtatgtgaatcaaccgcaaccgtccactcattgccaatttcgacttttttatcccatgctttgctgttatgtatggctaacttattcattataactgcgctccttattgttaatgaatagagtataacaaacaattctagaaaaacattggataacctcttggatttgagaaaaaaatacaaaaaaaccacaaccaagaagttgtggtttttgcaatccaaaacgattaacgttttgagaattgaggtgcacgacgagcgcctttaagaccgtattttttacgttctttcatacgagcgtcacgagtcagaagaccagcacgtttaagtgttgcacggtattctggatctgcttcaagcaaagcacgagcgataccatgacggattgctccagcttgaccagataagccgcctccatgtacgtttactaaaacatcataagtaccagctgtttcagttaaagttaatggttgtttgatatcttcgattagagctggcgatggaatgtgctcgctgatttcacgattattaacgacgatacgaccttctcctggaactaagcgcacgcgcgctacagaacttttacgacggccagtaccgtaatattgaacctgtgccaaattggtaacctcccttttaattaaccgcgaagttcgtaaacttcaggctgttgtgcttggtgtggatgctcagaaccacggtatacgttcaatttcttgaacatttgacgacctagagaacctttaggaagcatgcctttgatagcaagctcaagcattttctcagggtagtttgtacgcatttcaagagcagttcttgatttcagaccgcctgggtgcatcgtgtgacggtagtagattttatcagttaactttttaccagttaactcgattttttcagcgttgatgatgatcacatgatctccagtatcaacgtgcggtgtgtaagttggtttgtgttttccgcgaaggatagatgcaacttctgtagaaagacgtcctaaagtcttgcctgctgcatcaacaactaaccacttgcgttcaatagtacttgcgttagccataggtgttgtacgcatttaattccctcctaaatgatctgtcattttttcataaacttctgttacgttctatttcacaacacaataagttccggggcttatcgtggggttgaaatacataccatatgatatcttataactttatgcagactctgtcaagaaaatgttacacctggtttagttgtcatagcaaacgctccataaatacagcccgtgccccggtgcggtgcgccccgcggcttcgcgatccttcgcttccagcattgcttttacgtcatcaggagaaaattttccagcccctgtgtctaataacgttccggcaatgattctgaccatattatagagaaatccgtttccggtaatccgcatttgcaggccgtctccggtctcagtccattccagctcgtaaatcgttctgactttatcctgaaccgcggtatcaaccgcacaaaagcttgtgaaatcatgtgtcccgatgaggtgccttgaagcttccctcattttctgcacattaagctgatatgcaaaatggtaagcgtaatgtcgtttaaatacgtccgggtgtttctccgtgtatacaaagtagcgatattccttttggactgcgctaaatcgtgcatggaacccatcatccgcaatctctgctgttttgacggcaatgtcatcaggcagcagggcattgagcgcaaacggccatttctcagccggaatggacagcggagtatcaaaatgaatgacctgtccggcagcatgaacatcactgtcagtgcggccggatgagtagacaggcactctgccgtcggttttatggatgacggccagcgccttttccagttcactttgaacggtccgttttccaggctgaacctgatatccgttaaataaatgcccgtcataagcaatggtacatttcattctcattgggcagcacctctaacttcttaagaaaaacaataatacggctaatacgatgatgagcagaatagctccggtatccttgccggtccagacaagctttctgtatttcgttctcccctcaccgccctggtagcctctcgcctccatggcgaccgcgagctcttccgcacgtttaaaggcgctgacaaacaggggaacaagcagcggaacgaccgcttttattctgtctttcaccgggccgcttgtaaagtctgcacccctcgccatttgcgccttcatgattttatccgtctcttccatcagcgtcggaataaagcgcagcgatatcgacatcatcaatgcgagctcgtgtacgggcagcttcacctttttaaatggatgcaggagctgctccattccatccgttatttcaatcggcgttgtcgtaagcgtcagcagcgtcgtcataaaaatgaggtaaacgaaacggagagagataaaaatcccctgtacaagtccgccctcataaactttaaaccagccaagccgaaaaatgacagcaccctcatgcgtcatgaagatgtgcagtaaaaacgtaaatgccacaatccagataatcggcttaagccccttcagcaaaaagctgaccggcactcgcgtcaaggcgatcaccccgaatgtaaacaaaccgagcaaagcgtacgtctgtacgttgtttgccaaaaaaacgatacatacaaaaagaaaaatgctgacaagttttgttcgcgggtctaagcggtgaataagcgatgatccgggaacatactttccgataatcatgctgtccatcattggtccttatcctcctgaaagaaagccttaatttcaccggcggcatcctgcagggtgagcatgggtttctcatacttgactccgagaaccgcctcaagccgtctctgaaacttcaccgattcaggaagatccaggcccatttcggccatctcttcaccttttgcaaacaaatcactcggactccccgtcgctttaatcgttcctttgtgcatgacgatcatctcgtcggcatagcgggcggcgtcctccatgctgtgcgtgacgagaacggtagtcaggtttccccgctgatgaagcgcatagaacatgtccataatgtcctggcgccctcttggatcaagcccggccgtcggttcatctaaaaccagtacttccggctccatcgcaagaacaccggcgatcgccactctgcgcatctgcccgccgctgagctcaaacggcgaccgttccaaaatgtcttccggaagacccacaagctccagcatctctttcgccttccgttcagcgtcttcttttttcacaccgaagttcattggtccgaatgcgatgtccttcagtacagtctcctcaaacagctgatgttcgggaaattggaaaacgattccgacttttttccgcaaagccttaagatctttattctttttaccggctgctaaaatcgtgctgccgagctccagctgtcctttagtaggcctcagcaaaccgttcaaatgctgcaggagcgtcgatttacccgatcctgtatgcccgatgacggcaacgtagctgccctctttgatcacggcattgatatcatacagagcaagccgttcaaacggtgtctttatttgataacgatgttctacatctttgattttaatgtccacagctcattcaccagcccttcctgagtcagatggtttttcgataacgccagtccgctttctttcaaaagcaggctgagctggaatgagaaaggcaaatcaagaccgatgcgaaccaagtcttcatttaatttaaaaatctcttcaggcgggccctctgcatatttcctgccgccgttcattacaatgatcctgtccgcccttgcggcttcttccaagtcatgtgtaatcgaaatgacggtggccatgccttgatcttttaagcgtctgacagtatcaaggacttcttctctcccgatcgggtcaagcatggatgtcgcttcatccaaaatcataatatcaggacgcgcagcaataatccctgcgatcgccactctttgtttttgacctccggagagatggtgcggctcttgatcaagaaaatcctgcatattgacttgtttgacagcccaatctactctctcaatcatttcttcgcgcggaacaccattgttttctaaaccaaaagccacatcatcgcgaaccgttgttccgacaaattggttatcgggattctgaaagaccatccccattttttttcgcacatcccaaacagtatcttcagtcagtttcatgccgccgacttcaatatctccggcctcaggcaaaatcagtccgttcagcgctctggccaaagtcgacttccctgaaccgttgtgacctacgatagcaagccattctccttcgtatacctccagacttacaccgtccagcgccggcctttctgcatctttgcggtatcggaataagatgtcttttacggatataagctgtttttgatccacgggcgcctgacctcctctcagctatagctctgcttttctgtctcatgataaaaagttctggtatctaaaaaaagggcatagatccagttagaaactgtcccgcccttctttagatacacaaaaatatgtgattaaaccaattcgatgattgccattggtgcaccgtcaccacggcgaggaccaagcttcataatacgtgtgtatccgccttggcgctcctcgtaacgagttgcaatgtcagagaataatttttgaagtgcatcttggttattttcttcattagcaacctcgttgcgaatgtatgcagcagcttgacgacgagcatgcaagtcaccgcgtttaccaagagtgatcatcttttcaacaacagagcgaagttctttcgcacgtgtttcagttgtttcgattctttcgttgatgatcaaatctgttgtaagatcacgaagcatagctttacgctgtgaactcgtacgtcctagttttctgtatgacatgtgatgtcccctcctttaatggaatgctgtttctaattaaaaaacacacgaaaatcctagttcacatggaaactagatcaatcgtctttgcgaaggccgagtccaagttcttcaagtttcgctttcacttcttcaagtgatttgcgtcccaagttgcgaactttcatcatatcttcttccgtcttgttcgcaagttcttgaaccgtgttaatgcccgcacgcttcaagcagttgtaagaacggacagaaagatcaagttcctcaatcgtcatttcaagaactttttctttttgatcctcttctttttcaaccatgatttcagcatgctgagcttcgtcagttaaaccaacgaatatattaaggtgttcagttaaaatctttgaaccaagagcaattgcttccttcggtccagtgcttccgtcagtccaaacatcaagtgtaagtttgtcatagtttgcaacctggcctacacgagtgttttccacctgataagataaacgggaaactggcgtaaagattgaatcgatcggaatcacgccgattggctgatcgtctcttttgttcgaatcagcaggagtatacccacgtcctctttgtgcagtaaggcgaactcggaaactcgcattctcaccaagagtcgcgatatgaagatccggattaaggatttcaacatcgctgtcgtgtgtaatgtcagctgctgtgacagttccttcaccctgtacatcaatttcaagcgtcttctcttcatcagagtagattttcaatgcaagctttttaatgtgcaagattatcgttgtaacatcttccacaacgccttcgattgtcgagaattcgtgcagtacaccatctatctggatcgatgttacagcggcaccagggagtgaggataagaggatacgacgtaaggagttacccagagttgtaccatatccacgctcaagcggctctacgacaaacttaccaaatttggcatcgtcgctgatttcaaccgtttcgatttttggtttttcaatctcgatcattacttaaaaccctccttcaaaacgtcgaaacctcgaatagaatcatatgagattccatccgaaattccccattgtttagtcccgtatgtgctcaggcaacgagtcggtgcattcgtttcataaataactgtatcataacccattattgacagggacacaaaatctatacaaacaaattacacgcggcgacgttttggtggacggcatccattatgaggaacaggagttacgtctctgatagctgtaacttcaagtccggcagcttgtaaagcacggattgcagcttcacggccagaacctggtcctttaacagttacttcaagagttttaagtccgtgttcgattgaacctttagcagctgtttcagcagccatttgcgcagcaaaaggagtagatttacgagaacctctgaatcctagagctccggcacttgaccaagaaatagcattaccatgagtatcagtgatcgtaacgatcgtgttgttgaaagttgaacgaatatgagcgattcctgactcaatattctttttcacgcgacgtttacgcgtgttttgtttacgagcagcagccattgtttaggtacctcccttacttattttttcttgttagctacagtacgacgcggacctttacgagtacgcgcattgtttttagagttttgtccgcgaacaggcaaacctctgcgatggcggattccgcggtagcttccgatttcgatcagacgcttgatgttaagagaaacttcacggcgaaggtcaccttctactttcagtttgtcaataacatcacggattttaccaagttcttcttcagtaagatcacgcacacgagtatcttcagaaacaccagcctctttcaagacttgctgagccgttgtgcggccaattccgaagacatatgttaaagaaataacaacacgtttgtcacgtgggatatctacaccagcaatacgagccattctctgggcacctccttattaattatccttgtttttgtttatgctttggattttcacagatcaccattacttttccttttctgcggataactttacatttctcgcagattggtttaactgatggtctcactttcatgtgtttccaacctccttcagtttccggagtgctttatttgtaacggtacgtaatcctgccacgagttaagtcatatggagataattctaccgtaactttgtctccaggtaaaatgcgaatgaagtgcatgcggattttaccagatacgtgagccaaaaccgtatggccattctcgagttcaactttgaacatcgcgtttggcagtgtttcgactatcgtaccttccacttcaattacatcgtctttcgccattcaagtgttctcccttcttcaaatcagtaacttgctctctgacaaatttcaaaagagaaaatctcagttatccgtttgtcacacgccctgtttcgtttatactgttctgaacttccggagatacgcaatcataaagggtaaatgattgatattctttttctaaggagaatgaaatgtacgcttttctccgtctgctttagtacatgatgaagaatcttcattccgatgacagcagctagccggtttttcctccgaccaattgtacttctacaatctgcccaggtgcggaatgaaaaacatgtgtcatggaattcatttcatcatctagacttttgtcagtatatcaaaacccgtttccgtaatcgcaatcgtatgttcaaaatgagcacactttttcccatctaccgttacaaccgtccagttatcagtcaatgttttcacataccggctgccagcgttaaccatcggttctatagcgagaaccataccaggcttcagcctaggtcctttgtttggcggaccgtaatgaggaatttgcggatcctcatgcaagtcttgaccaacaccatgtccgacatactccctaacaactgaaaactgctcattttcgacatacgtttgtattgcgtgggaaatattcgacaaacgttcacctggttttgcttccttcaagcctttatataaagactcctctgtcacttccagcagtcgtttatcatcatcactgatgtttcctaccggatatgtccaagcagagtcaccatgataaccatttaatttagcaccgatatcaatgctgataatgtcaccgtcgcgcaaaacccttttgccgggaattccgtgaacgagttcttcattaactgatacacagatgctcccgcgaaacccattataccccttaaaagatgggattgcaccctgcttctcaataaaacgttcggcaatttgatccaattcttttgtcgagattcctggtttaatgtgctttttcaactcttcatgagtcaaagccacgattcgccctgcttcccgcatgatgctaagctcacgaggggtcttacagataatcatttgctcaatcctccaagaagctccttcacatctttgtacacgtcattaatgtcctgctggccattgacgttgacaagatatcctttctcggaataaaaatcgagtaaaggctgagtctgcttcatgttgacctcaagccgttttgagacggtttcctcattatcatctgcccgttgataaaggtctcctccgtctttatcacaaacacccggcgttttcggcggattgaaaaccaaatgataggttgtgccgcaaacactgcaaattctgcgtccagtcaaacgttccattaaagagtctttgtctactttaatgttaatgacataatcaatcggcttgccgtattcctcaagaatgtcttcaagagcttcagcctgagcgactgttcgcggaaatccgtccagaagaaaacctctttcacaatcatctttgccgagtctttctttgacaatgccgattgtgacttcgtccggtacgagctcgcctttatcaatataagactttgcttcgagtccgagtggtgtttcttctttcatagcagcacggaacatatctcccgttgagatatgaggtatcccataatcctcaacaattcgttctccctgtgtgcctttaccggctccaggaagtcccattaagactaagttcattcggatttcccccgtcctctcttatttagaggaatggttaaaaccagtcctctaatttttcataaatcctcggtaattacgtttcactaactggctctccagctgcttcattgtctccaaggctaccccgacgacaattaacaaagatgttccgccaatctgtgcactttgaggcaatccagcgaattgaatgaaaaagataggaagaatggaaatcacggctaagaatatagaacccacaaacgtaagtcgatacaaaatgctcgtaattctatcttgagtcattttccctggacgaacccccgggatatagccaccctgttttttaaggttatcagccatttgttcagggtttacctgcacaaaagcatagaagtacgtaaaggcgataattaatgcgacataaaccgtcatgcccaccggatgtgtattgtcaaagttggcttgaatccactttgtcacatcgtttgttccgaaaaatgacgcgatcgtacgcggcgtaataagaaacgcaacagcaaagattaccggaataacccctgcaggattcactttaagcggaaggtgagttgactggcctccgccaacaggtgaacgaccttgcccttttgcatattgaatcgcgattttgcgtacggcctgctgaatgaaaataacaccaacaataacggctaaaatcgcaatcaccagtaaggcgatttttacaatatgaataaacagctgatcgctgctgccgacaaattgagtctcataaatctgcccaacagttttcggaatactagccacaatccccgcgaagatgatgatcgaaattccgttacctactccattggaagtaatttgttctcccagccacattaaaaaagcagttcctccagtgagtactaaagcaataatcagatatgtcgatatgccggatttttcaatcagcataccgtttgccaggttgttaaacccgtatgacatacctaacgcctggataaaaccaagcacaatcgtaaaatatctcgtgaactgagctaatttacggcggccgacttcaccttgcttagaccactcagtaaacttcggaacaacatccatctgaagcagctgaatgatgatcgaagcggtgatgtaaggcgtaattcccatcgcgaagatagagaactgataaagcgcaccgccgccaaatgtattaaggagatcaaaaacccccatcgaactttgtgtctgtaacgcctgagcattaacatatggcacagggataaacgcacctatgcgaaagacgataagcatgagtaatgtaaaaatgattttattccgaatatcactcacacgcataaagttggagattgtcttaaacaagttagatcacctcagctgtaccgccagcagcttcaacagcttctttcgcagaagcagagaatttattggcttttacagttaattttttctctaatttaccgttgccaagaatctttactcctgcattaagtttgctaataacaccagtctcaagaagaagttcaggagtgacttccgttccttccgcaaaaccgttcaatttgtctacattcacaatcgcgtattccttacggttgatgtttgtaaaaccgcgtttaggaagacgttggaataaaggcatttgtcccccctcgaatccagggcgtacaccgccgccagaacgagcgttttgacctttgtgacctttaccagctgttttaccgttaccagaaccaataccacgacctacgcgattgcgcactttgcgtgaaccttctgaaggctttaattcatgaagtttcattaggacacctccttagcctatagtttatttttattgttctttaacagaaactagatgagatactttattaatcataccgcggatcgcagcgttatcttcatgaacgacagtttggttcgttttctttaaaccaagtgttcttacagtaacgcgctgatcttccgggcgaccgattacactgcgtttgagggtaatttctaatttagccattaatgttccctccttatcctaacagttcttctacagattttccacgaagcttcgcaacctcttcggcacgtttaagctcacttaaaccttgaagtgttgcacggatcatgttgatcggtgtgttagaacctaaagacttagaaaggatatcagcaacgccagcaagctcaagtaccgcacgtacagggcctccagcgataactccagtaccttcagaagcaggtttcaacaagatattgcctgcaccgaaacgtccgatgatttcgtgtggaatcgtagttccaaccattggtacttcaatcaaattctttttcgcatcttcaacagctttgcggattgcttcaggtacttcttgtgctttaccagtaccgaaacctacgtgaccgtttttgtcaccgacaacgactagagctgcgaaacggaaacgacgaccacctttaacaactttcgctacgcggttaaccgtaactaagcgttcttctaactctaatttgcttgggtcaatacgacgcataatcatgtgtccctcctttttttattaaaatttcagtccggcttcacgagctgcatcggccagagcttttacacgtccatggtataagtatccgccgcggtcaaatactacgtcagaaacacctttctcagaagcgcgtttcgcaacgagttcaccgactttagcagcagcagcgctgtcaccagtgctttccacgttcaaatctttgtcgagagtagaggcactaacaagtgtaacgccatttacatcatcgatgatttgagcataaatgtgtttgtttgaacggaacacattcagacgaggtctttcagctgtgcctgaaagtttagcacgaacacgagcatgtcttttttgacgagcagcatttttgctagttttcgtaatcatcctaggtcactcctttcttcactttaagcggtcttacttagcagatttaccttctttacggcgaacaacttcaccttcgtagcgaattcctttacctttgtaaggctctggagaacgtacagcgcggatgttagcagcgatagctcctacacgctctttgtctgtaccttttacaactacttttgtttgagaaggaacttcaatttcgatgccctcttcaggaacgatttcaacagggtgagagtatccaacgtttaaaacaagtttgtttccggatttagacgcacggtaaccgacaccgactaattccaaacctctttcaaatcctttagatacgccttcaaccatgtttccaagcagactgcgagtcgtaccatgcaacgcacggtgctctttatgatcagaaggacgagtgactgtaagcacgttgtcctcaattttgatttccatatcaggatggaaagtacgagttaattctccttttggtcctttcacagctacagtgttgccttcgttcagcgttactgtaacttcagaagggatctcaagcagtttcttacctacacgagacatactaaaacacctccattctttgttaaacttcttaccaaacgtatgctagaacttctccaccagcttgttttgcacgggcttctttgtccgttaaaacaccttgtgatgtagaaataatcgcgattccaagaccgttaagtacgcgaggtacttcatttgatttagcgtatacacgcaaacctggtttgctgattcttttaagaccagtgataacgcgctcgttgttttgtccgtatttcaagaaaacgcggatgataccttgtttgctgtcttctacgaactcaacgtcacgaatgaaaccttcacgctttaaaatgtcagcaatttctcttttcaatttagaagcaggaatttcaagcttctcatgacgtaccatgtttgcattacgaatacgagtcagcatatctgcaattggatctgtcataaccattatataattacctccttccctttcttggggattaccagctggcttttttcacgccaggaatttgtcctttatatgcaagctcacggaaacaaatacggcaaagtttaaatttacgaatgactgagtgcggacgtccgcagcgttcacagcgagtgtactcttgcactttaaactttggtgtacgttgttgtttcgcaatcattgactttttagccacgatttcgcctccctttcattgattatttctggaacggcatacctactagagttaatagctcacgagcctcttcgtcagagttagcagtcgttacgataacgatgtccattccgcgaacctttgttactttatcgtagtcaatttcagggaagattaactgttctttgataccgagagtgtagtttcctcgaccgtcgaaagatttcttagaaatcccgcggaagtcacgtacacgcggtaaagatacagaaataagtttatcaaggaaatcatacatgcgctctccgcgaagagttactttcgcaccgataggcattccctcacgaagacggaatccagcaattgatttcttcgcacgagtaacgacaggtttttgacctgcgataaacgttaattcttcaacagcactgtcgattgctttcgcgttttgaacagcatcaccaacacccatgttgattacgattttttcgattttcggcacctgcataacagagtcgtagttgaacttcgtcattaaagcaggtgaaatttctttattgtacttttctttaaggcggttcatgagatagacctcccttcctttaaatactatttatctaaaacttgcccagattttttagcaatacgaacttttttgccatcttccactttgtatcctacgcgagtcacttcacctgttttaggatcgagcggcataacgtttgatacatgaattggcgcctcttgattagaaataccgccttgagggtttgcttgagtcggtttagagtgtttcttcaccatgtttacgccctcaactagaacgcggtcctttttagggaaagcagcaaggatcgtaccttgtttgcctttatctttaccagagataaccattactttatcgccttttttcacatgcatcctgatcgcacctccttgagtaaggcatttatttcattagataacttctggagccagagaaacaattttcatgaagttgttttcacgtaattcacgagcaaccggtccgaagatacgagttccacgcgggctcttgtcgtcacggatgataacacatgcattctcatcgaagctgatgtatgatccgtcagatctgcgtgctccgctttttgtacgaacgataacagctcttacgacttcaccttttttgacaacgcctcctggtgttgcttgtttaaccgtgcaaacaattacatcaccaatgttagccgttttacgtccagaaccgccaagaactttaatagtaagtacctcacgcgcaccggagttgtcagcaacttttaaacgagtctcttgttgaatcattatttgttacctcccttcggaaaaaagaattccgaactttattagataataacagcttcttcgacaacttcaactagacgaaaacgcttagttgcagataatggacgagtttccatgacctttacgatgtctccgattttagcttggttattctcatcatgtgcttttaatttctttgagtattttacgcgcttaccgtagataggatcctttttgtatgtttcaacaacaacagtgatggttttatccattttgtcagaaacaacacggccttggtaaactttgcgctggttacgttcgctcatgctcacgacctcccctcagtgattatttgttagcagcaatttctctttcacgaatcacagttttcatgcgcgcgatagctttgcgcacttcacgaatgcgagcagtattttcaagttgtcctgtcgctaattgaaagcgaagattgaaaagttcttctttaagagactttactttttgttcaatttcagcagtggtaaggtcacgaatttcattagctttcatttgattcaccaccaatttcttcacgttttacgaacttcgttttaattggcaatttgtgagatgcaagacgaagcgcttcacgagctacctcttcagacacaccagaaatttcaaataaaactttgcccggttttacaacagctacccagccttcaggagcccctttaccggaacccatccgtacctcaagcggtttagcagtgtaaggttttgaagggaaaattttaatccaaactttaccgccacgtttcatgtaacgagtcatcgcaatacgtgcagcttcgatttggcggtttgtgatccaagaagcttcaagagcctggataccgtactcaccaaaatgtacttcagtaccgcctttagcgcgaccgcgcatttttccgcgatgctctctgcgatatttaacgcgttttggtaataacatattattttcctccttcctcagttttcttcttagtaggaagaacctctccacgatagatccagacttttacaccaagcttaccgtaagttgtgtcagcttcagatgttgcatagtcgatgtcagcacgtaaagtgtgcaatggaacagttccttcactgtagtattcagaacgagcgatgtcagctccgccaagacggccggaaaccattgttttcacaccttgtgctccagcacgcatagtgcgttggatttgttgtttctgcgcacggcggaaagaaatacggttttctagttgacgagcgatgttatcagctacaagctgagcatcaagatctgctcttttgatttcaagaatgttaatgtgtacacgcttgccagtaaggctgttaagggctttacgaagtgcttcaacttcagaaccgcctttaccgattaccataccaggcttagcagtgtggatcgtaatgttaacgcggtttgctgcgcgctcgatttctactttagaaacagaagcgtcagaaaggcgtttgctaatgaattcacgaatttttaaatcttcgtgcaggaagtcagcgtaatctttaccagcgtaccacttagattcccaatcacgaatgactccgatacgaagaccgactggatttaccttttgacccactacttatccctccttcttttctgatacaacgattgtaatgtggctcgtacgtttgttgatttggctcgcacgtcccatagcacgcgggcggaatctttttaacgttgggccttcgtcaacaaatgcctgagaaataaccagattgttagcgtccatctcgtagttgtgctcagcatttgcgatagcagattttaaaactttttcgatgattggagaagcagctctcggagttaggttcaagatagatactgcttcgcctacttgcttacctcgaatcaggtccattactagacgtgctttacgaggagcaatacggactgttcttgcaacagctttagcttgcatttaaaagcctcctctcttagcgtcttgtttttttatcgtcactggcgtggcctttgtaagtacgagtcggtgcgaattcgcccaacttgtggcctaccatgtcttcagaaatgaatacaggcacgtgtttacgtccgtcatagactgcgattgtgtgaccgataaattgtgggaaaatagttgaacggcgagaccaagtttttacaacttgtttcttgtccgtttcatttaatttctcgatttttgtcatcaagtgtccatcgacaaatggtccttttttcaagctgcgagccattttggaacctcccttcgtgattgcactacggtccgaaaagaaccgtagacaaccccgttatttatttttacgacgacgtacgataaatttatcagatttgttctttttcttacgtgttttgaatccaagagtcggtttgccccatggagacattggtgatttacgtccgattggcgcgcgaccttcaccaccaccgtgcgggtgatcgttagggttcattacagaaccacgaactgtagggcggatgcctttccagcgagagcgtcctgctttaccaacgttgataagttcgtgctgctcgttacctacttgaccgatagaagcgcggcaagcagaaaggatcatgcgaacttcaccagagttaagacgtacaagaacgtatttgccttctttaccaagaacctgagcagatgtaccagctgaacgtacaagctgtccgcctttaccaggttttaattcaatgttatgcacaactgtaccaacagggatgttgataagcggaagtgcgttacctactttgatgtcagcttcagggccggacatgatttcagtacctacttgaattccttttggtgcaagaatgtaacgtttttctccgtctacatagttgattagcgcgatgttagctgaacggtttggatcgtattcaactgtagcaacgcgtccaggtataccatctttatcgcgtttgaagtcgataacacggtattggcgtttgtgtccgccaccttggtgacgtacagtcaatttaccttggttgttacgtccgcctttcttgtgaaggggcgcaagcaaggatttttccggctggtcagtcgtgatttcagcaaaatctgaagttgtcatgccacgacgtccgttagaggtcggtttatactttttaatcgccattttgaatttccctccttctttttacagataattaagcttcaaaaatttcgatttctttgctgtctgcagtaagttttacgatcgcttttctgcgacggctagtcataccagtatagcggccgacacgttttgatttccctttgtagttcatgatgttgactttgtcaactttcactccaaagatactttcaactgcatctttcacttctgttttattagctcttacatcaacttcaaaagtatatttcttttcagtcattaaatcagcagaacgttcagtaatgacggggcgcttaagaacatcacgaggatctttcattatgcaagcacctcctctactttttcaaccgcagcttttgtaatcagaagcttctcgtggttgacaacgtctaacacgttgattccgttagcttgaacaactgtaactccagggatgttgcgtgcagaaagagatactgcttcgtttgcatccgcagttacgattaaagcttttttctcaacagataatcctttaaggatagctgccatttcttttgttttaaccgtatcaagagtaagatcttcaagaacaataatgttgttgtcgttcactttagaagacaatactgatttgattgccaagcggcgaacttttttaggtaatttgtaagaatagctgcgtggtgttgggccgaatacgacaccacctccgcgccattgcggtgaacggattgaaccttgacgggcacgacctgtacctttttgacgccatggtttgcgacctccgccgcgtacttcagaacgattttttactttgtgagatccttgacgtaaggaagctctttgcataagaatagcgtcgaatactacgctctcatttggctcaattccaaatacagaagcgtttaattcgatatcaccagcagtagaaccgttttggttgtataatgctacttttggcatgatcaatttcctcctttcctaagagacttatttagatttaacagcactttttacagtgattaaagcttttctcgcaccaggtacgttacctttaatcagaagaagattgcgctcagcatcaacttttacgacttcaaggttttggacagtgatttgatctccgcccatgcgtccaggtaatagtttacctttgaatacacggttaggatctacaggtcccattgaaccaggacgacggtggtagcgtgaaccgtgagacataggtccgcgagattgtccgtggcgcttgattgcaccttggaaacctttacctttagatactcctgttacatctacgatttctcctgcagagaaaatttcaaccttgacttcctgaccaatttcatacgcatccatatccacgccgcgtaattctttaacgaagcgcttaggagcagtttccgcttttgcaacgtgtcctttttccggtttgtttgaaagcttttcacgcttatcgtcaaaaccaagctggatcgcttcatagccatcattttcagctgttttcttttgaagaacaacgtttggagctgcttcaataacagttaccgggataagatcaccgttttctgcgaatacttgcgtcataccaatttttcttcctaagattcctttggtcattcgtcacacctcctattaagatcattctatattttagaattaaagtttgatttcgatatcgacaccagatggtaagtctaatcgcatgagagcatcaacagtttgtggtgttgggttcacaatatcgattaaacgtttatgtgtacgcatttcaaattgctcacgagaatctttgtatttgtgcaccgcacgaaggattgtgtaaactgatttttcagttggcaacgggatcggaccagatacgctggcaccagaacgttttgccgtttcaacaatcttctctgcagattgatcaaggattctatgatcatatgcttttaaacgaatacgaattttttgttttgccattattttccctccttttcgcctacatcacgttagacagttctccgtgagaaaaacctgatcaccttgccatggcaaagcggccgggtgtgtcagcaacctctcacttcatcgcagtcaaagaccaacatacactattatacagaaaatagacgcatgttgcaaggtttatttaaagaaccttgtggttttcacactttgattattatacaggtgatgccatgattaatcaaggatatgcctgttttctttcagagatggaaagatgcgaatcggctgacaacttcagcaaagcgatccggctcttccaagtgaggcgaatgggctgagttttcaaaccagtgccattctttatagggagcttcaaccttctgataatattcgtaagatatcgttcccggcaccgtcaaatcgaatcttcctgacataaaacagcacggtatttcaatagaagaaactgattgcccggcatcaaagaaaatgagatcttcccacaaatgtttcaggctgaacatctgtccccgcgcggctaagaagctccctctcacaccgtacggttcaccaaacagcattcgtccgcctgctttaagggcgccgatcggattatgggtaaagcctcctcccttcatctcgatacaaagcagaaacaatgagcgctgaagctggctgttccatggaggtgcaccgataaagcgcagcgtcttttgtagcaggcggtgtttgcgctcctcgctccaatccgtcagcagccggtaggcttccgtttcttccttttggatatttacaacctgactgataccgatatacccatcatacaaatcaggtctctcttgaagaacatgaagcgccaacactgatccccacgaatagccggcgatatatattttttgcctgttgaattgcttgcataagcgttcggtcaaatgaatggtgtcagctgtcagctgatccaaagtcatagacgagcccggaatttcatttgaatatgaaagtcccgcccctctctgatcccagttcacaacagtgaaatgcttttccagctcgctctggtactttctcgcatagccgatttgaggcgtgccgggcccgccgtgcaaaaacaaaagcagcggattgctcttgtcatcaccattaatcataatggtctgttcactgtcgttaatcagcagttgctgaagcattgaaatccgttttgtcttgaagttatcaatcatcgctctgctcctaaattttgtataacttctattatacattgaatcagccgggaaacaaaaaaacgaggccccgcatgggaccccgtattaatgaacgagtcgattactcagtgattgtagaaacaacgcctgaaccaactgtacgtccgccttcacgaatagagaaacgagttccttcttcgatagcgattgtagagataagttcaacgatcatttcagtgttatctccaggcataaccatttctacgccttctggaagattgatgataccagttacgtcagttgtacggaagtagaactgaggacggtagttagagaagaatggagtatgacgtccaccctcttctttagaaagaacgtaaacttcagctttgaatttgctgtgtggagtgattgtacctggtttagcaagtacttgaccacgttggatgtcttcacgagctacaccgcgaagaagtgcaccgatgttgtctccagcttcagcatagtcaagaagcttacggaacatttcaacacctgtaacagttgttttgctgttttcttcttgaagaccgatgatttcaacttcgtcaccgactttaacttgtccgcgttctacacggccagtagcaactgtaccacgaccagtgattgagaatacgtcctcaactggcatcatgaatggtttttcagtgtcgcgttctggagttgggatgtactcgtcaactgcagccataagttcaagaattttttcttcgtactcagcgtcgccttcaagagctttaagagcagaacccttaacaactggtacatcatcaccagggaagtcgtattcgctaagaagatcgcgaacttccatttcaacaagctcaagaagctcttcgtcgtctaccatgtcgcatttgttaaggaatactacgatgtatggtacaccaacgtttttagaaagaaggatgtgctcacgagtttgtggcattgggccatcagcagcagatactacaaggatagctccgtccatttgcgcagcaccagtgatcatgtttttaacatagtcagcgtgtcctgggcagtcaacgtgtgcatagtgacgagtgtcagtttcgtactcaacgtgtgcagtagagattgtgataccgcgctcacgttcttctggagcaccatcaatttgatcgtacgccatagctgtacctttaccagatttcttatgaagtactgttgagatagcagcagttaatgttgttttaccatggtcaacgtgtccaattgtaccgatattggcatgtgatttggaacggtcgaatttttctttagccattctaaaatcctccttaagagcttttaattagtaatgtatagagtgatagaaagtgaaagcaagctctcacttcctcatcttacaatagtagttatacttgagttaagtggcaaaatcaattattcgcctttattttttttgataatttcttcagcgatgctcttcggcacttcttcgtagtgatccatgaacattgtgaacgtaccgcgtccttgcgtgttagaacgaagggcagtagcgtaaccgaacatttcagcaagaggtaccatcgcacgcacaacttgagcgttaccgcgagcttccataccttctacgcgtccgcgacgagaagtaacatcacccatgatgtctcccatgtattcttcaggaataacaacttcaactttcatgattggttcaagaagaactgggttacatttgctgactgcatttttcaatgccatagaagcagcgactttaaacgccatttcgtttgagtcaacatcatggtaagatccatcaaaaagtttcgccttgatgtcgattagcgggaatccggctaggacaccattttcaagagagtcttcaagacctgcttgtacggctgggatgtattcacgaggaacaacaccaccgacgattgcgttttcgaattcaaagccagcgccttcttcgttcggttcaaattcgatccaaacgtgaccgaactgaccgcgtccgcctgattgacgtacgaatttaccttcaacttttgcaccggtacggaatgtctcacggtacgcaacttgaggagcaccaacgttagcttcaactttgaactcacgcttcatacgatcaacaatgatatcaaggtgaagctcacccataccagagatgattgtttgacccgtttcagggtttgtttgtgtacggaatgtaggatcttcttcagcaagtttcgctaaagcgatacccattttatcttggtcagcttttgatttaggctcaatcgctacgtcgataacaggctctgggaattccattgattcaaggattacaagatccttctcatcacatagagtatctccagtagaagtatcttttagacctacagcagctgcgatgtctccagcgtaaacagtagagatctcttcacggctgttagcgtgcatttgaaggatacgtcctacgcgctcacgcttgccttttgtagagttctttacatatgaaccggaatcaagtgtaccggaatatacgcggaagaatgtcagcttaccgacataagggtcagtcataactttaaatgcaagtgcagagaatggctcttcatcagaagaatgacgaacgatctcttcatctgtgtcaggacgtacacctttgattgcagcaacatcagttggcgcaggaaggtagtcaagaacagcatcaagtacaagctgaacacctttgtttttgaaagcagatccaacaagtacagggtagaattcaacattcagtgtacctttacggatagcagctttcagttcaggaatagtgatttcttcaccctcaaggtacttttccataagctcttcatcaagctcagctacagcttcaatcaggctgctgcgaagctcttcagcttgctctttgtactcttcagggatttcttttgcatctgaacgagttccaaggtcatcttcatagaaatacgcaacgttttctactaagtcgatgataccttcgaagttgtcttcagcaccgatcggcaattgaattgcgtgagcgttagcttgaagacggtctctcagagtgcctacagagtaaaggaagtctgcgccgattttgtccattttgttgacaaatacgacacgcggtactccgtaagttgttgcttgacgccatactgtttctgtttgaggctcaacacctgattgagcatcaagtacggcaaccgcaccatcaagtacacgaagtgaacgttcaacttcaactgtgaagtctacgtgtcccggtgtatcgatgatgtttacacggtaacctttccactgtgcagttgttgctgcagaagtgattgtgattccgcgttcttgctcctgctccatccagtccatttgcgaagcaccttcgtgagtttcgccaattttgtggatacggcctgtgtagaacaagatccgttctgtagtagtcgttttaccggcatcgatgtgagccatgatcccgatattacgagttttttctaaggagaactctcttgccattgggtaatttctccttccttattagggaattgtagttttgattatataaatcctaccagcggtagtgagcgaatgctttgttcgcttctgccatcttgtgagtgtcttcacgtttcttaacggcagcaccagtgttgttagctgcatcaagaatttcgttagccaggcgctcttccattgttttttctccgcgaagacgcgcatagttaaccaaccagcgaagaccaagagttgtacggcgttcaggacgaacttctacaggcacttggtagttagctccacctacacggcgtgcttttacttcaagtacaggcatgatgtttttcaatgcttgttcgaaaacctccattgcatcattgccagtgcgttctttaatgatatcgaatgacttgtataggattgtttgagatttaccttttttaccgtcgatcatcattttgttgatcaggcgggatacaagcttagagttgtaaagcggatcaggtaaaacgtctctttttgctacaggacctttacgtggcatctgaatatcctcccttcatagttttaatgatttatttgattactttgctttagggcgtttagtaccgtatttagaacggccttgcgcacggttttcaactccggcagtatcaagcgcaccacgaacgatgtggtagcgtacccccggtaagtcttttacacgtccgccgcggatcagtacaacgctgtgctcttgcaggttgtgaccgataccaggaatgtaggcagtaacctcgattccgttagtcaaacgaacacgagcatatttacgaagtgctgagttcggttttttcggtgtcattgtacccacacgagtacataccccgcgtttttgtggagaagatacgttagtgtgctcttttttaaagctgttgtatcctttgtttagtgcaggtgacttagagttttcaactttgctcacgcgtcccttgcgaattagctgattaattgtaggcatgttgtgttcctcccttcattacgttttataacccacatacccaggtggttcatcattaggcaaaaaacaatgtctttacacaagattgaaatcttatataaaaacaaaaagtacgctataacataatggcaacagctgctgctcccacttcaattccgcaggctttgccgagctttttcatggaatccaccatacagacagcgatgttttggttctttgcaagctggataacgccagccgtaagaactgaatccgcgtcttttgccacgacgacttccttcactgaacctcgtttcagagctttcactgtttgcttcgtaccaataataattgatttggcctgtgatactttatcataagacataaacatatcctccaaagtaacaggttttatttcgagcaccttggttatattatcactctgcgggacggatgtcaacatcgtatgacattttttagtgcagtccgccgcaagaataaatgtaatactgaggaaaggctgtcgaaacagccttcccgcagcagtttatgttattcagccggaaccatatcttccgcaggctgaacgtttgaaacaggttttacttttctgtaattcatcataccggtaccggccggaaccagtttaccgatgataacattctctttcaggccgagaagttcatcacgcttgcctttaatcgcagcatctgtaagaacgcgtgttgtttcttggaatgatgcggcagacaagaatgaatctgtctcaagtgaagctttcgtgataccgagaaggacaggacggcctgtagcaggtcgattgccttcaagcagcacttttttgttcgcttctgtgaattggtgaatatcaagcaatgtgccaggaagaacatcagtatctccggcatcgatcacacggactttgcgaagcatctggcgaaccattacttctacgtgtttatcgccgatttcaaccccctgcatacggtaaaccttctgaacctcatgcagaagatattcctgaaccgttgtcaggtcagtgactttaagaagttctttcggatcgatagaaccttctgtcaggacttggccgcgggtaatctgatcaccctcagccactttcaggcgtgagttgtaaggtgccgtgtatgaacgtgtctcaacagcgccctgaacaacaatttcctgctgtttgtcgcggacttcattgatttcggcaattgtaccgtcaatttcagaaatcgtcgcttgacctttcggattacgcgcttcgaaaagctcttggatacgcggaagaccttgtgtgatatcgtctccggcaaccccgcctgtgtggaacgtacgcattgttaactgtgttccaggctcaccgatagattgggcggcgataatgcctactgcttcgccgacttcaacgtcggttccggttgcaaggtttcgtccgtagcatcgtttacatacaccatgaggagtgttacatgtaaacgcagaacggatccacacttcttcgattcctgcttcaacgatttccagcgctttatcttcatcgatcaattcgttttcgttaatgagcacagcacccgtttcaggatgtttgatctgttttctggcgaaacgtccgatcagacgctcttccagacgctcgatgatttccgtaccttctttaagcggttttgcaagaataccgcggtcagttccgcaatctgtttcacgaatgataacatcctgcgcaacatcaacaagacggcgtgtcaggtaacctgagtcagctgttttcagggcggtatcggcaagacctttacgcgcaccgtgagtggagataaagtactccaatactgtcagaccttcacggaaacttgatttgatcggcaattcaatgattcgtccagccgggttggccatcagaccccgcatacccgcaagctgcgtaaagttagatgcgttaccacgggctcctgaatcactcatcatgtaaatcgggttgacttcgtctaatgatttcatcagtttgccttggataacgtccttcgctgaactccaaattgaaataactctttcataacgttcttcttcagtgattaaaccgcgtctgaactgtttcatgacattatcaactttgctctgtgcttcttcaagaatttcctgcttatcatcgagaacgacgatatcagaaacccctactgtgatgccggctttcgttgaatatctgaaaccgaggtttttcatgcggtcaagcattttagacgtttccgtgatatggaatcgtttaaagatttccgcgatgattttacccagaataccttttttaaacggtgcgttgatcggctgctctgcaatcacagcttttacgtcagcacctttatctaagaagaaacggtcaggtgttttctcttcaatgttgctcttcgacggctcattcatgtaagggaatgactcaggaagaatttcattgaagaccagcttaccgactgttgtaattaacagttttgaacgttgctcatccgtaaatgtcacattcttcagggagttcgccgcaacggctactctcgtatgaaggtgaacatatccgttttgataagcaagaagcgcttcgtccgtatttttgaagaccatgccttcgccgactgctccggcgcgctcaagcgtcaggtagtagtttcctaataccatatcctgagacggcgtaacaaccggtttaccatctttagggttcaagatgttttgagccgcaagcatcagaatgcgcgcctcagcttgagcctcagctgataaaggtacgtgaaccgccatttggtcaccgtcaaagtcagcgttataagctgtacatactaacgggtgaagacggatggcgcgtccttcaacaagcgtaggttcgaaagcctggatacctaatctgtgaagcgtaggggcacggttcagtaagaccggatgctccttaatgacagattcaagtacatcccatacttcaggctgcacgcgttcgattttgcgttttgcgctcttgatattgtgagcaagacctttttcaacaagctctttcataacgaatggcttgaagagctcaagcgccatttccttcggcaatccgcactgatacattttcaggtgcggacctacgacgataacggaacgtcctgagtagtctacacgtttaccgagaaggttctgacggaaacgcccttgtttccctttcagcatatgagaaagagatttgagcggacggttacccggtccggtaaccggacggccgcggcgtccgttgtcaatcagagcatcgactgcttcctgaagcatacgtttttcgttctgaacgatgatgctaggagcaccgaggtctaacagacgttttaaacggttgttacggttgatgacacgacggtaaaggtcgttcaggtcagacgttgcgaaacgtccgccgtcaagctgaaccatcggtcttaactcaggcggaataaccggaagcacatcgaggatcatccaagacggcttgtttcctgaattacggaaggcttcaagcacttcaaggcgtttgatcgcacgcgtacggcgctgtccttgagaggttttcagctcttcttttaacatatcaacttctttgacgaggtcgatgtcctgcagaagtttattaatggcttccgcacccatagaggcttggaatttgtttccgtacttatccagatacgcacggtattccttttcagataaaagctgtttcttttcgagcggtgtattggccgggtcagttacgacgtaagaagcaaagtaaatgacttcttccagcgcacgcggtgacatatccaatacaagacccatacggctcggaatacctttgaaataccaaatgtgagaaaccggggcagccagttcaatatgccccattctctcacgacggactttagcccgcgttacttcaactccgcaacggtcacaaactacgcctttataacgaacccgcttgtacttgccgcaatgacattcccagtccttagtcggtccgaaaatgcgttcgcagaacaggccgtccttttcaggtttcaacgtacgatagtttatcgtttcaggctttttcacttcaccaaaagaccatgaacggattttatccggtgaagcaagaccgatgttcatatactcaaaattgttcacatctagcaaggggcctacctccctttttatcttcggattaaccgatgtcacttgcctttatcaatcagagactattctttagttactgcgtcacgttcaacgtctggagatgctgtttcttccggcgcttcatcacctgataatgcaaggccgtcagcttgtttcgcatcttcttcgtcttctagatctctcatttctatttcttcttcatcacttgagaggatttttacatccatacctaagctttgaagctctttgatcaatactttgaatgattccggaacaccaggctctggaacattatcgcctttgacgatggcttcatatgttttcacacgtccgaccacgtcatcagacttcacagtcaggatttcttgaagcgtgtaagctgcgccgtaagcttcaagcgcccaaacctccatctcaccgaaacgctgtccgccgaattgggctttaccgccgagaggctgctgcgtaacaagtgagtaagggcctgtagaacgggcatgaagtttatcatcaaccatgtgtgccagtttgatcatgtacatgattccgacagatacacggttgtcgaacggttctcccgtacggccgtcataaagaactgttttggcgtctcttgacatgcctgcttcttcaagtgtttcccacacgtcttcttcacgcgcgccgtcaaatacaggtgacgcgatgtgaatgccgaggtagcgggcagccatacccatgtgaagttctaatacctgaccgatattcatacgggatggtacacccagcgggttaagcatgatatcgatcggcgtgccgtcaggaaggtaaggcatatcttcttcaggaagaatcttcgagataacccctttgtttccgtgacgtccggccattttatccccttcagaaatcttacgtttctgaacgatatatacgcgtacaagctggttcacgcccggaggaagttcgtctccgtcttcacggttgaagacttttacgtcgtggataattccgccgccgccatgaggcacacggagagaagtatcacggacttcacgcgctttttctccaaagattgcatgcagaaggcgctcttcagccgtaagctcagttacacctttaggcgttactttacctacgagaaggtctccgtcgttgacttccgcaccgatacggataattccgcggtcatcaaggttgcgaagcgcatcttcccctacgtttggaatatcgcgggtgatctcttccggtccaagctttgtatcacgtgcttctgattcatattcttcaatgtgaatagatgtgtatacatcatctttcacaagacgttcactcatgatgatggcatcctcatagttataaccatcccatgtcatgaagccgaccattacgttgcggccgagagcaagctcacccagctccattgaagggccgtcagcaaggatttctcctttgactacttcatcaccgacactgacgatcggacgctggttgtagcacgtaccttggttggagcggacaaatttcagcaagctgtacttatccaggttgccttttactttttgaccgtcaatttcttcatagcggcgcacccatacgtttttcgcttccacccgttcaacgataccagggtgtttacaaataacggctgcaccggagtctttaccggatacgtattccatacccgttccgacgatcggagcttccggctgcatcaaaggcacagcctgacgctgcatgttcgctcccatgagggcgcggttcgagtcatcgttttccaagaacggaatacatgctgtcgcagcagatacaacctgtttaggagatacgtccatgtaatccacgcggttgcgggctacaacggtgttttcccctctgaaacgggctacgatgctgtcatccaagaaagaaccgtcatcgctcagcttagcgttcgcttgggctacgacatagttatcctcttcatcagcagtcaggtagtcgattctaggcgttacttttcctgtttcaggatcaacgcggcggtatggcgtctcaatgaaaccaaagcggtttactttcgcaaatgatgacaatgagttgatcaaaccgatgttcgggccctcaggcgtttcaatcggacacatacgtccatagtgagagtagtgaacgtcacgtacttccatacctgcacgctcacgcgtcaaaccgcccggtccgagagctgacagacggcgtttatgcgtcaattcagcaagcgggttcgtctgatccatgaattgagaaagctgtgagcttccgaagaactctttaatagacgcaataacaggtctgatgttaatcagctgctgcggcgtgattgtgtttgtgtcttgaattgacattctttcacgtacgacacgttccatccggcttaaaccgatacggaattggttttgcaggagttcacctacagaacgcagacggcggtttccgagatggtcgatatcatcagtgtcgcccactccgtgcaggaggttgaagaagtagctgatagaagaaataatatcagcaggcgtaatgtttttaatcgcctcttcaatgtaagcattgccgatcacgttgatcgtctgctctccttctgcatcagtaggagcatagattttaatggattgaagcatcacttcatcctcgactacgccgccgttaggataaagttttctgaagccgattccattttctaagtatggcagtactttatcaagtgttcttctgtcaagaatctgccctttttcagcgagaatttcaccggtttcaggatccaccagtgtctctgcaaggcgctggttaaacaggcggttcttgatatgaagctttttattaattttatagcgtcctacattcgcaaggtcgtatcgcttcggatcgaagaaacgggaatccagcaagctctttgcgttttctactgtaggcggctctccgggacgaaggcgctcatagatttcaagaagcgctttgtcactgttttcagtgttgtccttatccagtgtattgcggagatattcgttctctccaatgagatcgagaatctcttggtcggaaccgaagccgagagcacgcaaaagaaccgtaaccggcaacttacgtgtgcgatcaatgcggacatacacaacatctttcgcatcagtttcgtattctaaccatgcgccacggtttggaatgacagtcgcggtaaaaccttttttaccgtttttgtctactttaccactgaaatatacacttggagaccgaacaagctgagatacgataacacgttctgcaccgttgatgataaaagtaccggtatctgtcataatagggaaatcacccatgaagacatcctggtcttttacctctccagtttctttgttaattaaacgaaccttcactcttagcggagctgagtaagtcacatcacgttcttttgactcttcaacgggatacttaggatctcctaaactgtagtcaatgaactcaagagagaggttaccagtgaaatcctcaattggtgatatgtcttgaaacatctctctaagaccctcatcaagaaaccactgataagaagaggtttgaatttcaatgagatttggtaattctaacacttcgctaatgcgagcatagcttctgcgctggcggtgtcgtccatactgaactagttgacctgtcaactgattcacccctcaaatcatgcgtattatatgtgtaataagcatcccttacaatgaagaaatacttttacaagacaaaagaaaaaagggtttctaattaagaaaaccacatccaaaaacaaataccgattttattagcatttccatgtttgtataatttatacatgcactatgattattcagcatatcatgcaaaatatatacattggcattttacaatattaacatagctgaaaattcaagtcaaactttttttgcttttatgatataatagcctttctttttttgaacaacagaaacttcgtcaaaaagttccttcagtttttcaacggcagaaggcccgccctgttttttctgtataacgatccacaattcacctgaagcccttaaatgctcagcgcttttttcaaaaatggcatggacaactttttttccggcgcggattggggggtttgtaataatcgaagcaaatgtttgagcagaatcaatatttgaaaataaatcactctgataaatctgaacgttttttattccgtttttttctgcattttcatttgacagctctacggctctttcattcacgtcaatcatgtgcacggtccggtctgtaaattcaccggcaagcgacagaccgatcggcccgtagccgcagcctgcatccaagaagtcaccgtcaatttcaggctcttcaaacgcttcaattaagacacgtgaaccgaaatcaacttcctttttcgagaaaacgccgctgtcacttgtgaatgtataagatctgttccgcagtgtaaatgaccatgtctgtttatcgcttttaactgaaggtttttctgaataatagtgttcactcattattagaacctccttttttaatggcacttaaagaaaagcaaagaaaaagcccgcctcataaaagcgagcttcccctacaggcaagtgaagattacttaacttctacagaagcgccaacttcttcaagtttagctttaagctcttcagcttcttctttcgcaataccttctttaagtggttttggagtgttgtcaacaagttctttagcttctttcaagccaagaccagtgatttcacgaacaactttgataactttgattttctgagaacctgcaccagcaaggataaggtcgaattcgctttgctcttcagcagcgccgccagcagcagctccgccagctacagctacaggagcagcagcagttacgccaaattcttcttcgattgcttttactaggtcgttcaattcaagtacagttgcttctttaacggaagcaatgatttcttcgatatttaaagccatttgaaattcctccatttgttttattttaggttaaaatcagattaagcgccttgttcttccttttgatctgcaactgctttagctgcaagtgcaaggttgcgaactggagcttgaagtacgctaagcaacatagaaagtaagccatcgcgtgaaggaagttcagcaagagctttcacttcttcaacagaagatactttaccttcgataacgcccgctttgatttccagagcttcgtggtttttcgcgaactcgttaagaactttcgccggagcgacaacatcttcagtactgaatgcgatcgcattcggtccagttaagacatcattcaaaccatcaagttcagcttgttcaaccgcacggcgagtcattgtgtttttgtacactttgaactctacgttagcttcgcgaagctgtttacggagttcagttacttcagaaacgttaagtccgcggtagtcaacgatgatcgttgatttgctttctttcagtttagaagcaatctcttcaacaacaactttttttgtttcaattgcgctgctcatggttacacctcctgtagattttgtgtaacacttataccgctaggtgatcacgactgtgacgacgattccatataaaaagcctccatgtggacatggaggctgtatatacaagcatacgtaacgtaatagctgtgatatatatacacctcggcaggatattaagccacaacggcccctgctgtctacggtataaatgacatattatattttacaacattttgaatcatatcagaatgctgatctaaagtcaaatattattttacgttgaaagtagaagcgtctactttgacaccagggcccatagtagaagtaacggcaacgtttttcacgtaaacacctttagccgcagccggttttgctttcaggattgtatcatacattgttgtgaagttctcaacaagtttttcatcctcgaaagaaacttttccgattggaacatggatgttaccagctttatcaacgcggtattcaactttaccagctttgatttcgccgattgctttttctacttcgaatgtaacagttcctgttttagggtttggcataagaccttttggtccaagcacacggccgattttaccgacttcacccatcatgtcaggagtcgcaacgattacatcaaaatcgaaccagccttgctggattttcgtgatgtaatcagaatcgcctacgtagtctgcaccggcagcttcagcttcttttgctttttcgcctttagcgaatacaagcacacgctgagttttaccagttccgttaggaagaacgactgcaccgcggatttgctgatcgtttttacgagggtcaacccctaaacgaaaagcaacttcaactgtagcgtcgaatttagctgtgtttgtttttttagtaagcgccactgcttcagcgacgtcgtaagcttttgcacggtctacaagcttcgcagcttcaacgtactttttaccttttttagccattttaaaatttcctccttatgtggttatagcggaataacctcccacgaataagggttgcgaacttgtgaaaactcgcaacccgacaagaaacaaattaatcctcgataacgatacccatactgcgggcagtaccttcaaccatgcgcattgccgcttcaacgtctgctgcgtttaagtcaggcattttcgtttcagcgatttcgcgaaccttatcgcgcttaacggttgccactttattacggtttggttcaccagaaccagactcaattccagctgcttttttaagcaatactgcagcaggcggagtttttgtaataaatgtaaatgaacggtcttcgtaaaccgaaatttcaacaggaatgattaaaccagcttggtcagctgtacgagcgttaaactccttacagaatcccatgatatttacaccggcttgacctagtgcaggtccaactggcggcgctgggttagcttttccagcaggaatttgcaattttacaacttttactacttttttagccacgagacacacctccttaagtccgtgatgtggtaatagggtaaaccctcccactcaaggtttcattctttatatgaatgacgaaatatcaagctagctgccttggattagtccaagacgtacctttgctatattatcattaatatatagcaatttcaagttttttcacattacaatttgtcgatctgggtaaattccagttcaacaggcgtttcacggccgaacatgttaacgaatactttcactttgctcttatcataatcaatctcttcaattgatcctgtaaagttggtgaatggtccgtctatgactttgactgtctcattcaattcaaaatcaatgtctgttttccgctcgtccatgcccatccgttttaagatggcttccgcttcgccgggtaaaagcggagtcggttttgagcctgaaccggctgatccgacgaatccggtaacgcccggcgtgttgcggaccacataccatgaatcatcagtcatgacgatttcaacaagcacatatcccgggaatactttctttttgactacttttttcttgccgttcttaatatcagtctcttcttcttcaggaacgaccacgcggaaaattttatcctgcattcccattgattccacacgtttttcaaggtttgcttttactttgttttcataaccggaatacgtatgaacaacataccaattcttttccattctatcaggactctgcagtccttccctccccgcatttaaaaatgaagtgtaaaacaaaaaataggcgcagagcctatgaatccttttttcaacacaataaaaaacccgctgaacgggttttggcaaacgatattatgatctattatagcacgtattgctgatcattattcaactattaaacgaattaattgagaaattcctgtatcaaggagggcaaaaaagataacaaaaaagataaccgttgaaatcaccgtgatcgtatagcgcgttaactctttgccttttggccagctaacctttttcatttctttcccaacatctttaaagaaactcatcatgcgcatgtaaaagacctccacaatttaaaaagcgaacactattttgtttctaaatgagctgtatgtgaattgcaagtgctgcagtacttcttaacttctaaccgctcagccgctgatgcagagcttttcattgtcgtataattacgatttccgcatgttttgcatgccagcgtaatcttttttctcatatcgttacaccttttcctaaatagacattcatttatcttaataaaatagcacagtcagaaaaattctgtcaatatgacacagaaacccgctacatgctgatttctcttatttctaaatacttctcaagcttgcgctttacacgctgcaaggcattatcgattgattttacgtgtcggtttaagtcatctgaaatttcttggtaacttcttccgtctaagtacaaaacaagcacctttctctccagatcgctcagcagttctcccattttcatttcaatatcatcaaattcttcctgattaataatcatttcttcaggatttaacgttttagcgcctgagatgacatcaagcagtgttctgtctgattcttcatcaaaaataggcttgtctaaagaaacataggaatttaaaggaatgtgtttctgacgggtagctgtctttatagcggtaataatctggcgggtaatgcataattctgcaaaagctttaaatgaagtgagcttgtcctctctaaagtctcggatagacttatataagcctatcatcccttcctgtacaatatcttctctgtcagcccctattaaaaaataagacctggctttcgcccgtacaaaattacggtacttcgtaatcaagtaatctaacgcatcactatccccaacatgaaccttttcaatgacctgctcgtcctccaactggcaaaactgcactttgttgaattttcccttgttgttctgtagattcactgcgatccccccggcgcacgtagatagaaatattatacattaatgggcgaaaaagcgtcaacctaatccaggccgccgcgacgccacttttcaaacgttttcaaaacctcttcggacagctcgattttacccgggggtttttcggaagtgatctttgaaacccgtctttgaatccggcgttctatcgcatcaacttccctcagcagctcccgggcggatttgcggagagccccttgtccgaaaatcgcccactgctccgtataatcagaggtcgcgacatgaatctgtgtcgcgatattattcagcgcctgggcaagcttctcgatccgctcatccgccgtttcattctcccgtgtaaaaatcacttcgactctgtgattcgtgtgttttttctctatgccttttaccagatgtgcgtcaaacaccacaatgactttgattcccgtgtatgactgatattccgccatcttctgaatcagcacatctctcgcttcttcaaaactgttcgcttttaaatcctttagctgcggccaagctcctatcatgttgtatccgtctactaataggatgtccatcggtctttattcccctaaaggattgcgtttccggtagacttcatacatcagaaggccggccgctactgacgcattcagagacgtgacttttccggccatcggaagtttaatgagaaaatcacatttctctttcacaaggcggcccattcctcttccttcgcttccgataacaagcgccaaaggcatcttgccgtccatagagcggtagtcttcccgggcggatgcatccgttccgacaacccaaatgccccgctccttcatttcatcaagtgtccgggcaaggttggtcaccttcacgacgggaatgtgttcaatggcaccggtcgatgcttttgcgaccgtcgcagtcagaccgaccgctctgcgtttcggaataacgatgccgtgtgcgccgacggcatcagccgttctcatgatagatccgaggttatgagggtcttccagctcgtccaatatgagaaagaaaggctgttcgtttctctcttccgctcttttatataattcgtctaattgtgcatattcatatgccgccacctgggcgacaactccctgatgctgcccctccaccatctgatcgagttttttcctcggtacaaattggatagtgatgccttgttttttcgcaagctcaataacttgctgcgcctgtccttttactgtgttttccgccatccataacttgtacagcttgcgatcagactttaacgtctcaatcactgcgttttttcctatgacgtaatcatgttgctgactcatttgttttcctccctgacgtcccgacttgtaaagcctcagtaatcagctgatccagtctttcttctcttttctcaagaaaaagatatccgagcaaagcctcaaaagctgtactatggcggtacgtctgtacatctgtgtttttaggtgtcgtccctgatttcgcgtttcttcctcttctcagcacggcttcctcttcttccgtgaaaaaggattcgtcctgaaggcggaaaagaatgtctgcctgtgattttgccgatacaatccggcttgctttcttatgaaggtcattcggtttcgtatggccctgcttaagcaggtgatgccggacatatatttcaaaaatggcatcacccatataagcgagcgcaagaccgtttaactgctttgaatctttgatttgttcaaattgaagcatccgcttactctccccgcttccagcgagttccctgagccgtatcctcaagaatgatattcatgcttttcagctgatcgcgaatctggtcggataaagcaaaatcgcgattacggcgggcttcatttctcttctcaatcaattcttcaatttcttcatcgacaagctcttcttcaccgagcgtaagtccgagaacagatccgattctgtcaaacatgctgataaaggctttaatgacgtgatccgccgtattgtcctcctgcatgtagtaattggcgagcttcgctaaatcaaaccatacggaaatcgcattcgccgtattaaagtcatcatccattgcttcttcaaatgccgtgcggtgctcttcgattttagcgagccattcatcatcattgtcagtcagattcgtgctgctaatcaaacgatggtttaaattactgtaggccgtcttcaagcggttaaacgcgttttttgttttctcaagcagctcctccgaatagttgatcgggtggcggtaatgaacggacagcatgaaaaatctcagcagctgcgggtcatattgcttaatgatatcgtgcaccaaaacaaagttgccgagcgattttgacattttctcattatctatattgatataaccgttgtgaagccagtattttgcgaatgtcttgcctgtcaatgcttcggattgtgcgatttcattttcatggtgcgggaatgtcaggtcctgaccgccggcatgaatatcgatctcgtcacccaaatactttttcaccattgcggagcattcaatatgccagcctgggcggccttttccccaagggctatcccatgagatttctccgtctttggcggctttccaaagagcaaagtccagcgcatcctctttcttctcaccgacacggatacgcgctccagatctgagttcatcaattgattgctgagatagcttgccgtagccttcgaaggctcttgttttgaaatagacgtcgccttctgattcataagcgtagccttttttaatcagctcgctgacaaattcaataatggcgtccatgttctccataacccgagggtgaagatctgctttccggcatccgagggcgcccacgtcttcaaaatacgctttaatgaaccgctcagaaacggtcggaacgtcctcgccgagctcgttggcggctttaatcagtttgtcgtcaacatcggtgaaattcgatacatattgaacgtcgtaccctttatattccaaatagttgcgtacggtgtcatacacaatcgccggacgggcgtttccgatatgaatatagttgtatacagtcggtccgcacacgtacatttttacttttccttcctcaagaggaacgaatgtttcctttttccgtgtcaatgtattataaagtgtaatggtcatttttggttgatcctttcttttttatcttccagttcagcctgcagctcaaaaatctgctgctccaatgctctaaaccggtcagcaaccggatcgggcaagtcttggtgattgagatcgcgtttgatttttcttccgttctgaatgacgacttttcccggtatgccgacaacggttgaaaagtcgggaacatcacgcagcacaacggagccggcccctactttagaaccttgcccgactgttatagagccgagcaccttcgcccctgttgcaattaaagcatcatctttaatggtcggatgccgctttcccttttcttttcccgttcccccgagagtgacaccttggaaaaccgtcacgttattgccgatttcacacgtttcccctatgacgacccccataccgtggtcaatgaaaaatcttctcccgatggtcgcgccgggatggatttcaataccggtaaagaaacgggcaatctgcgatatcagccgcgcaaggaagaaaaacctccgtttatataaagcatgtgcaatccgatgcgcccatatagcatgtaaaccagaataagttaaaacaacttcgaaatagcttcttgctgccggatcttgatcgaacactgtatctatgtcttcttttagcattttaaaaaacacatgcttccccccattctctccccgctccagtctatttttccgcctataaaaaaagcgcctctgcatgtaaacatgacagagacgcttttaccgcgcggttccactctgtttgaaaaacaaaatgctgttttcccaacttaaaagccggtaacggcggcggccgcctttaaatactgatttccgcagaaatgttcttcaaaggtcttaagggcgcacttctaaaacatgacgcatgaatctctctcagccgatgaagattctttctgtaatggtcattgttttatactcttccctgtcaacaatcgtatatttagatgcttttcaggcgttttacggctgtttctcttccgatcagctcaatagcctgcggaagctccggaccgtgtgtctggccggtaaccgctacacgaatcggcatgaacagctttttgcctttatggcctgtttctttctgaacagctttaattgaggctttgatctgctcaggcgtaaattcttcaagctcttcaagcttcgcagcaaatgcgctgagcacttcaggcacctgttcttcttccagaacggcttttgcctcttgattatactcgatttcatccttaaagaacaaatcagtcagctcgacaatttcagcgccgtagctcaattgctcatgataaagagagatcaacttatgcacccattcctgctcttcggcagaaagctcagtgccgacttttcctgctttttgcaggtgaggaagagtcagctcaacaacttgatcaagatccagcgctttgacgtattggttgttgacccatttcagtttatgcatatcaaacagagccggtgacttagataaacgattcacatcaaaaatttcaataaattgctctcttgtgaagagctcttcttcaccgacaggagaccagccgagaagtccgataaagttaaacagcgcttcaggcaggtaacccagctcttcatactgctcaataaactggataattgattcatcacgcttacttaattttttgcggctttcgtttacgataagcgtcatatgaccgaatacaggaatatcccagccgaacgcctgaaaaatcatgatctgtttcggtgtatttgaaatatggtcttcaccgcggagcacgtgcgtcattttcattaagtaatcgtcaattgcgacggcaaagttatacgtcggtgttccgtcttttttgacgatgacaaagtcgccgataccgtctgattcaaaagaaatctcgccctttacgatatcgttaaaagcgatgattttcccttccggcacgcggaaacggatgctcggctgtctgccttcggctaaaaactgctcctgctcttcctgagtcaggtttctgtgtttgccggaatagcgcggcatttccccgcgggcgatctgctcttcacgttctttttcaagttcttcttccgtacagaaacatttataagcaagccctttttcaagaagctcttcatagtatactttgtaaatgtcgttacgctcagactggcggtacgggccgtactctccgccgacatccacactttcatcccagtccatgccgagccatttcaaatagttaagctggctttgctctccgccttcaatatttcgctttttgtccgtgtcctcaatccggataataaactttccgccttggctgcgggcaaataaatagttaaaaagcgccgttctggcgttaccgatatgcaaatgtccggtcggactcggtgcatagcgaacgcgtacttcatttcccatgttcaaatacttcctttcatctcgtctgtagcctctagccgaatatatgtatctattctaccaccaaatagaccgggcatcaaaacaatgatcaggctttttggatcagaacggtcgcctgagcggcaattccttcggctcttccggtaaacccgagcttttctgtcgttgtcgcttttacatttacttgagagacgtctgcctcaagaccttccgctattcgttttctcatagcatcaatatgcggagccattttcggcttttgcgcaataatcgtgcagtctatatttccgagtacatatcctttttctttgacaatattccagacatgctgaagcagcttaaaagaatccgcatccttgaattccggatcagtatccgggaaatgcctgccgatatctccttcacctaccgctccaaggcacgcgtctgcgactgtatgaagcaatacatccgcatcagaatgcccgagcagccctttttcataaggtatttcaattccgccgatgatgagaggacggccttccgttaattgatgcacatcaaatccttgtccgattctaaacattatgattcccactttccgctttcatgattgcttccgctgttatcagatcatccggtgttgtcagcttaatattggtatagctgccttcaacgatactcacctgatatccgtcaagccgctcgacgagactggcgtcatccgtgcctaagaagcctttattttccgcctccatatgcgccttcttcaataaagaaagacgaaaagcctgcggcgtttgaacggcccacaagcttgaacggtcaaaggtctccgcaacccgggagccttccgcccgttttatcgtatctttcacaggaacagccaggacagccgctcccgcctcctctgctgtttcaacgagcttatcgatatgctgatgcgtgacaaacgggcgcgccccgtcatgaacaaggacgacggactccttatcaatcactttcaatccttcgtatacactgtgctgacgctccgccccgccggtgacaagctcaacttccgtttggatcggaaattgggcgagcagctgacgaaaatcttcccgttcactttcattgatcacgaggattatttttttacacgggccgtggctttcaaaaacccgcagtgtgtgtataataacaggcgcaccctttaagctgatgaacagcttatttttcccggccttcatccgtttcccttgtccggcagccggaatgactacgacatactccatcattaactccctcttaaagagccttctcaagcagcttaggcttggcaaaaatcattcgccccgctgctgtctgcagtacgctggttacaagcacatcaatatgtttccctatataattgcggccttcttccacaacgatcattgttccgtcatccaagtaagccacaccttgattatgctctttcccgtccttaatcacctgcacattcatctcttcacccggaagcacaaccggcttcacggcgttcgcaaggtcattaatattcagtaccgcaaccttctgaagctcacatactttatttaaattaaaatcattcgtcacaacgacgccggatgtcagcttcgcaagtttgacaagcttgctgtcaacctcctgaatgtcttcaaagtcgccttcataaatttcaacggtaatatcaagttccttttgaatgcgattcaagatatccagtccgcggcgtcctctgttacgttttaaaacatctgaagaatcggcgatatgctgtaattcctccagcacaaattgaggaattacaatgactccttctaaaaagcccgtctgacaaatatctgcaattctcccatcaataataacacttgtatccaagattttcagccttttctcctgttcctcctgctcctcatcgccgcttccctttttcttctgcattcttgcagaaatggagaacaggctgatcagttcatcctttttcttaaatccgacctgaaagccgagataaccgagaaagaaagccagaaagaccgggatgatggtgctgaatatacggtacggaatattgtccagcggaatcacgtttacaatgagatatgcgatgataagtccaaaaaccaatccgagacttccgaataacagatccggcaccggggctctcagcaaagaatcttcaatccattttacccaattaatcacatattctgtcgtccatatactgatgagaaaaaagataatagcaccaattgcagcagacgtatatgcgtttgttattaaaggtatgtcctgtatatttgacagtacaaacaattcaggtattaaaaagataccgacaacgcaacccacaataatgaagaacgcctgaactattcgttttaacatacccccacctccttttaagtagcatttttcagcagactgtcaaagcctacaaatatcagaataaacaaaaactaacaataatatacccggattcccacaggtttaagcgatacttaaagctgtctatctatatagtgtttttcttggaggcgttttaagccttttttgattttttgggcgcgcacctcgccgataccttcaacatcatccagttcttcggctgtcgcttccgttatgcttggcaaaaatccgaatgcctcaaccacattttcaacaatcggcatcggcagacgcggaattttgttcagcagcctgtatcctctcggcagaacataatcatcgagattggtagaagcgggatatccaagcagcttaaacaaaatggaatcatcaagcagatcatagctggacatatcctgaagctcttttaacagcacgaacggatctttgattttttcttttacatagtctttgatgaaaagagccgcttcttcttccatatccgtaatcagttcaatcacctgcagacggattaagtggccttccgttccgagttctttaatatacatgttgatttcattttttatacggagcaccatttcataccggtgcatgacggacagcacgtcactgaatgtcacaagctcctcaaattctaaggcgtttaaagctgtaatcgttttgtctagaatggttttatacttctcaagcgtttgaatggcctggttagcctttgttaaaataaagcctatgtcctttagtgtgtacttcatgctgtcctggtataacgtaatgacatttctgcgttcagaaatggctatgacgagacagccggtctgctttgccacccgttccgctgtacggtgcctcattcccgtttctgaagaagaaatggtcgcctccggcataagctgcgtattcgcataaagaattttctggccggaatcacttaaaataatggctccgtccattttggccagctcgtataagtgagcgggcgcaaatgatgtattaatatgaaaaccgccatccacgacttgttttaccttatcgttgtatccgacaacaatcaggccgcctgtatttgcccgaagtacattttctatcccggctctgagcggggttcccggtgcaacgaactgcaggattgcagacaggtcaagctcttgtttcgccccttttttctctttttccatctattatgatcctcctaatgaagtacgaagcgcttctgcaacatttgctactccgacaacctcaatcccttttggtattgtccatccgtctgaatttgcctcaggtatgaccatacgcttgaagccgagcttcgccgcttcttttacgcgctgttcgattcttgacaccctgcggacttctcctgtcagacccacttcaccgataaagcaatctgcaggatttggcggtgtatctctgaagcttgaagcaatgctgacggctactgccaaatcaatcgctggttcatccagtttgaccccgccggcgacttttaaatacgcatcttgattttgaagcaacagccccacccgcttctcaagcacagccatgattaacgacaccctgttgtggtcaattcctgtagccatgcggcgcggatttccgaagctggtcggtgatatgagcgcctggatttcaactaagatcggtctcgtgccttccattgacgcaacgatactcgaacccgaagccccggcagaacgctcttctaagaaaatttcagaagggttcagcacttctgtaagcccttcttcccgcatttcaaagatgcccatttcatttgttgagccgaaacggttttttacagcccgcaaaatacggaatgtatggtgccgctctccttcaaagtatagaacggtatcgaccatatgctcaagcaatctcggtcctgcgatcgatccttcttttgtaacgtgtccgacgataaaaataggtatgccgtttgttttcgcgattttcatcaattcggccgtacactctcttacttgtgatacactgccgggagctgaggtgatatcactttggtaaacggtctgaatggagtctaccacaacaaatgcgggtttcatctcttgtatagcagacgaaatatactccatatcggtttcagataaaacatgtaacaattggctgttgattccaagtctgtcggcgcgcagcttcgtttgcttcacagattcttccccagaaatgtaaagcacgctgccggccgtgtctgctaattgtgcggatacttgaagaaggagcgttgatttaccgatgccgggatcgccgccgattaatactaacgagcccttcacaactccgccgccaagcactctgttgaattcttcgagcttggtttgaacgcggggttcttctgatgtttcaattgatgtaatgggtgatggtttctggacggtttgaacggaatgggagaaagccgcccgccgattcgccggcgctttttttatggtttcttccaccattgtattccaagccccgcagcccgggcactttcccatccattttgcggattcataaccgcatgagtggcagatgaattttgtttttgatttagccatatacgctgtaagacctcttccttatcgaatatttctctatataacaaagtgaggcatacacttgcttacgtatgcctcatgtttgtcactatattagttcgttttagcagtcgtttttacgacaaattcgccgtcctctacatcaagaacgatgtgctgccctttatcaatattgcccctgaggagctcttctgataaacggtcctccacatgcttttggatcgctcttcttaacggacgtgcgccgtattccaaatcgacgccctcgtctgctacttttgcttttgcagcttctgtcagctctatagagagatcttgttctttcagacgttttgttaactggtcagacataagcgacacgatgtctgtaagatgttttttctcaagggagtggaagacgataatttcgtcaatccggttgataaactcaggcctgaaggcacgcttcagctctcccatcactttgtctttcatgtctttatggttttgtgattcatcctgaacattgaagccgacatatttgttgcgtttcagctcgctcgctccgacgtttgacgtcataatcaggatcgtgttgcggaaatcaacagtgcgtccttttgaatcagtcaagcgtccgtcttcaagcacttgcaagagaatgttaaacacatcaggatgcgctttttcaatttcatcaagcagtacgacagagtaaggttttcttctcactttttctgtcagctggccgccttcatcatagccgacatatcccggaggagaaccgacaaggcgtgaagtcgaatgtttctccatgtattcggacatatccactctgatcatcgcttcctcatcaccgaaaatggattccgccagtgctcttgccagctctgtcttccctacgcctgtaggacctaagaagatgaatgaaccaatcggacgtttcggatccttcagaccggctcttgcacgtctcacagcctttgcaacggctacaacggcttcatcctggccaatgacacgagagtgcagaatgctttccatattgagaagcttatctgtttccgtttgcgcaattttagatacaggcaccccggtccagctggatacaaccatcgcgatatcctctacagaaacttcggagttctcttggccttgtttttctttccacgtttttttcgtatcttccacctgttctctcaggcgctgctccgtatcacgaagagaagccgctttttcaaattcctggctttgaacggcagcgtctttttccttgcgaacttcatcaagcttctgctcaagctcttttaagttcggaggcgttgtgaaagaacggagacgcacttttgaaccggcttcgtcaattaaatcgatcgctttatccggaaggaagcggtcagatatataacggtcggacaatttaactgccgcttcgatcgcttcatcagtaatggatacgcggtgatgcgcttcatagcggtcacggagtccttttaaaatttgaatgctttcatcgactgacggctcatccacctgaatcggctggaaacggcgctccagggctgcgtctttttcgatatatttgcggtattcatcaagcgttgtcgcaccgatgcactgaagctctccgcgcgccaatgaaggttttaaaatattcgacgcgtcaatcgcaccttctgctcctcccgctccgatcagtgtgtgcagttcatcaatgaataaaatgatattgccggcctgacgtatttcatccattacctttttcaagcggtcttcaaattctccgcggtatttcgtgccggctacaaccgtccccatatctaacgtcattacgcgtttatcacgtaaaatttccggcacttcattgttgatgatctgctgtgcgaggccttcggcaatcgcagttttacctacacccggttctccaataagaacggggttattctttgttctgcggcttaatacctcaataacacgctgaatttctttgcttcggccgataaccggatcaaggctgtcttccctcgcaatcgcggttaaatcacgcgccagactgtcaagcgtcggagtgtttgcgctgctatttgttccggctccagatgtccctgtttcattgcttccgagaagctgaagaacctgctgtctcgccttattgagactgacacccagattattcagaactctcgcggcgactccctcaccttcacgaatcagcccgagaagtatgtgttctgttcctacataagaatgtcccagctttctggcttcatccattgagagttctattaccttttttgctcgaggcgtgtaatgagggacagatgtggtgctttcctgtcctcggccaatcaaactttccacttctttttgcattttatctgaattgaggcccagcgcttctaaggctttaaatgctatcccttcaccttcacggactaaccccaataatatatgttcagttccgatatttgtatggcctaagcgcagtgcttcttcctgtgccagtgccaataccttttgagctcgctctgtaaatcttccaaacatcatatcgaatcatcctcctgtctatttgcactcatttctaaatgcagcctttccctgataagagccgctcttctcacgtctctttcgttcggccgtaatgcaccgcccgaatattgctggagaaaacccggctgtgtcaaaatcatcagttcattaagtatattgcttgatagccctttaatgatccccaggtctatccccagccgaacgtcagaaaggcatttcgccgtttccttcgattcaatcatacggcagttggataaaactccgtaagatctgaatacccggtcctctaattcaattttcgaggtttgataaagcgcttctcgggctgagcgttcctgctcaatcagctgggcagccacactgttcaaatcatcgacgatgtcctgttctgactttccaagtgtgatttgatttgaaatttgaaagatatttcctaatgcttcgctgccttcaccgtaaattcctctaacaaccagacctaattggttaattgccggtataattcgattcatttgcctagttaatacgagacccggcaaatgcatcatgaccgaagcccttagccccgtccctacatttgtaggacagcttgttaagtaccctctcttctcaccaaaggcgtaatccactttctcctcaatccagtcatcaacctggtttgcagcttttatcgcattgagaagctggaagccggggaagaggcattgaattctgatatgatcttcttcatttaacataatgctgacttcctcattttcagaaagcagacagccgccaaacggcgattccgttaaattcgggctgatcagatgtttctccatcagcacccgtttttccagaggctgagcttcactcattctgattaaatgaaattgaccgatatcaggaagttttttccctgaaaaatgatcttcgaattgctgaataatggatgaggcttcttcattcgtataccgggcaggaaactttatattttcaaagttacgggccaaccgtatacggctgctgagtacaatgtcactttcaggtccctcttgcttcatccaattgcttaatgcgtcctgaataaaatgcttgagcgacattacccttgttcctcctcactgtctgtgctttttaattcctgctccaacgatcggatctgatccctgacctgcgctgctttttcaaactcttcctggtgtattaaagattctagctccttttttaacatttccatttgccgccttacatgcaggtttccgcctatacgttttggaattttcccggcgtgcaccgtattcccgctgtggactttccgcaagatcggcgtaatttggctatagaacgtatcgtaacactccgcacagccgaaccgcccagttttcctcagttgctgaaacgtcatgccgcatttcttacaagctgtgccttgctctgggtagccgaacatttgagaacccgtgttttgaaatgaagactccatattcagcagccctgataataaattatgaatcgagaacccttggtttccacttataccgtatgagtcactgttttcttttgcgcattgttcacatatatgaacttcttgcttttctccattaacaactttcgtaaagtgaaaagtggccggtctctcattgcactcttgacaaatcaatcttttcacccgcttactttagttttaaagatgtgagcattgctttcatcattctggctcttagctcatcccgttcgggcaaatcaatatatagaactgagcgatccattacactcaccatcattttagcttctctttccgaaataaccccgtcctctaacagtctgagaataatatcatcagaggctgcctgagacaagtgggtatgaatttgcgaaataatattattgataaggacgacttcgttattcattttaattttgataatacgaatataaccgccgcctccccgtttactttcaacaatatatcctctttcgcttgtgaatctggtgttgatgacataatttatttgagaaggaacacactgaaatttatcagcaatttcactgcgcttgatctctaaaatttctttgccattttgatctaatacttgttttaagtactgttcaatgatgtcagaaatattatgtcccactcaaccccctcctttattgactttgactatatttgactttaatcttactataaggtgtttcgcaaaatttttcaactgtagcgctctatctctattatttccactttacacaagcataaaacctgcttttgcaaaaaggcatatcgttacttttctcgtattatataacgtatgcagaaaaacacaaaaaaggcagctcatgatgagctgcctttaccgttaagataggcggttttaacattcgtttttgtccagctcgttacctcaaacgcaaggggtgcgttattgtatatcactgcaaaacctcctttaccgcataaaaataactgctacaccgtatcccttttcggaatcgtaagccgtcttaattcgcattactttaaatccgctgttgtcccctgttttcgttgcaacaccgtctgtgcccgccgtaaccctatcgcctactttgacagtgtcgtcaatgcgcacgtgtatttgaccgattagcccgacgatatgccactcaacgcgctcatcacgcggaatatattcgagggtcggatcatagttaggattttctttcggcacgaccagctcgcggccattctcgatgattgtttcgtagatcatgccgccaaactcgttacgcaagaaccgatcattccagtaaaaacccgcgcctcccaatacaacgcccgcagtttcggatataatgccgtccacgctgtcccctggctgcgcttttcggattttatcgccttcgagcgttaccataaggctggaatcaattctctgtccgtccagtgactcgaagtattccgcaacgtccttaaaatcggaaacactttcgacccggccgacgccctgaatattaccgttcatggagtcgatcttccatttgatgttccctgcggatgcttcgccagaaccatacccgcctacaaccgtataaccgtcatcgtttattacggactgtgacgataagatagtccgagccgggccgtcgccttttgtatgcgaattgttcgttgcgagaatagcctgccgcgatccttcagtcgatgaacctcccgaaacgccgcccatgaagtttctaggccctttcgcaacattatcacccgtagccgcaatgattgcgctcgtcggatctaggggtgatccgctcgtggtagcgcctttgaatcctcctttaaaattcgtgggcacaacgctgtacgaacgcccaccgaggtttgccgcagatgcatacccagtcgcgttaattgcagcaagttctacttggttattaggagaataaacgcccatctcaccgttatctccaatcaatgtggcgccaatcagagacgcattataaaccccgccaccgaacgcgacaccaatcggtgaagactcggagatagttacgccggagatctgtacatagtcagttctttgcgcgccgccaaaagctcgtatgtcgtggctggccgtcttaaaccctcgaatcttgattccatcaacgttgatatagctagatttaaattgaaacgctactaccgggttagccttgtaatcgtattgtggatcgccgatcgcagtaaaattcgaaatctgaacatgtttataggctgagatacccaacgctcttggagaaatatctgcgtataaactattaaagacgggttcaatcgatgtgcaatttgcgaatgtcacatgatacgcagatgtactctcaggatcagtctcgctatgatgggcgatgtgtcttgcatcgtaagaacgaacgtctctataagaaatatgattcgtcacatggatgttttgcgatgccggccattctttgtgcgcctttacttcgacgcctcgaatgtttccactcgtataacagccgtctacccaaacattttttgacccgtcatcaatttcgatcccattcgaattagcagcaccggctgggtgcgcctttccgctagggctcatacaatgcgaatttgaaatgaaaatgtattcgctataatgcgtcgtaattccgtcatcaccataaccggacgcaacgcagttatccagccaaacgtaatatgatccgtcagccgtataattttccgcagtattgtcgtatgtcggagccgttatatcgaagccgtgtagaccggggtttaccgcctctacgtccttaatccaaccgaattttactttcgcgaaagttaagcagctcgaatttataccgcccgtcgcagtcacgccgccttgtcgatccgggtaccaatcgagcgtcattccctctacgtagatattccggtttcctcctgagtggtcagcgttcgtaataacccactcactggccggcgtatcctcgtgtagcttcagcgtagtaacgccttttccttgaccgataagatacgtccatgaggggagtttagcgcctttgatgacgtattcgcccgccgataaattaaggcgcaccttaccattaccgagtgcccttacgaaagcatccgtactatctgttttgccagtaggatcggcgccataatcgtccacgtttacgttgcgttgaattttccggagcaacttgtagtactctttatcgagccgctcttttaatagaggttcaacgttgccgtccgcgtctacacgagcgtctaccacctcttttacgttcgttccgtctgcgttaagaatcaagttttttatacggttatacagaccgtctatatatgtgcgcaaagaaaaaccgctatggtcaatctgatctgacgtatgggcatgctccgcggtcttatggcggctcaaaccgttactcagatcgagcatgtcgttgccgatgtcttcgaggttttggttatagttcttgatatactgacggtcaaacccgcctgtatcagctttcttatatgagtatttccccatgcgctcacctccgtttagttcgctttaaattgcgtgttgattgcgataaaagcgttcgcagtagaattcgtactgctttcgatgcaaacatcgccatttgtttttataacgccggtataaataaaaccaacgcctgccgatccggtaaaatgatacgggtaagttggccgaaaaccttccggaagtgtgtaaaccggtgttgtcggtccgatggttccacctttcgcaacgcctcgtaatatcaccgttccgaccatatccttaccgtactgaaccggataacttccagaagcgtcagtgtattgcgcccatccgttttttaacgtcggagccgtccaggttatagtcgttagacgggcttccaatgcagcggccgctccaccggactcctttgaatcccacgataacttctctgatgcagttacgtgtatatccgtgttttttacatgcgcatctaaatcgctcttgagcgccaatcccgcggtattcagcgcgcttgctttaatggttccggtcgacgaatcgattaccttatcaaccgttttcttagtcgtatcaaaatccgcaattaaatccgacgcttttttcgtgactgacccgaatgtgaaaaccggtggctttttgtcattcgaatagtcttcgatagttaagacgcgtagctgaacgttaatatcaaacggttcgataacgcaccacagataatcgccttttctcacgtctttaaaacccatatttgcgagctcaatagccgtaaatgttagcgaaatgtccagactgtcaccgagcttattcttcatttctgccagcaacgaagatctatccgtaaacctttcgtcttttaccggctcggcgtgctttattccgtagatcgttgctagtggacttgtatactccgcctgcacaacataggtaccatcatctttttgtttaccgtagccgcgaatataagtcgcaaagctactagtatcgatctctttttccggctcactgacgttgtacttgtatcgcagaaaaggttcgtctttcttgctgccgatctttttcgcaatgtaaatacgcttaccagcgtaatcaaactctgcgccaaacttttcgagaatgcttcgcagtaaagctaacgaattatcccatccgaagttttgaacctctactgatgtcggaagatccgtatagtctacttcgtacgtgtatccggtcccttttaacgcaaaatcgagcatcgcatttattcgcatcgtgcccgatttctcttcgtaaatccgataatttatcaagtcgtcaaatatccggtgaagtgccgttacctcaacgcccacgccgtttttggacgttttttccttgtgcgttttgataatgtattcttcgtctttataaataaggatattttcatttttaacgagtttataaccgtgttgatttagagccgtcttatatcccgttacatttaacgttttttctccctcgattccgttactacgcgtagcaaagaagcccggcaaaggttccgcgattcccgatatatcttttactgctaaaatagccatcgtcgctgcacctacttatacaaataatgaaaatcgaaagatatttcgaagcttcccaccgttccggaaagttcgatctcgttccatccgggagcaagcgaaatgtagcctcggttcgtattcgcgtatatgcttgtgccgttcttcaaatgccggaggccttcgagattcagcacatcggttaatccggagctccccgaataagccaccgtttgggtagtcgttttattcgcgagcttaaaattagatgaggcgcctttataaacgatgtctaacggtacgtcttcggctggatcaattgtgacgttacctgcgttataaattcggaatctgttcgttttgtgtcgatacgataaatcgtccgaaggtaacatgccttgcgcgacttgccacttatcggagttaaacgttaatgggtcgagcgttgaacctaaagaagccgcaaaaggaaaagcagccgtaaactcaaccgtaagttttccgctccttggcgtaatatcttccggctcgtacgtgctgcttacttttacggaccaaacctttccgggctggcgcgaatctataatttccatttcgttctgtgtcgcgaatagattgtatatctcatccagtaacaaatgataatcgagatgatccacgcctttaaaaagaaagacggccgttaacttccggatgtcgaatgtcgtacctacatcgattgatccgttacggccgtctatttcctgaagatctgtacggtgggttaacgagtcctttcgaaaactaaggagccgcaaaccgaaatcacggtgatcgatcgtctcaccgttttttataattatcagatgcactaccgatcacccctaaataatcttttcatcgtagcttgttgcgcctgagagctgtcgacgtagttagtaaaagcatccttatctacccgtacgctcggatctttttgagcgattatattaagcgccgctaaagatcgttgctccacgctaaccagccgctcaagcagattcgctacaaccgtctgatctgttccgctctctacgcctaatttcttaccggtttctttataaagctgaagcgcccgctgacggttattctttaacgggatgactgcttccggaccctcttccgcaacccaggcgagttgcttttgcgttacaatgtcgccgattttgtaacccttgtaagggccgccggcacgcattgatttaattcccggaacgttgaaaaccgttttgtatcgggaaatgatgtagcgaatggccgcaaccgcgttgtgaaccggattcatgatatcgcccattcccttcattttatacgcgtcaaacgtcggtctaatcgtctgcataagacccatcgatggcgttccccgtttccagttgctatcccatttgttgatcgttgaaggaccggtccttcctccggattctttcattgcgattgttgttaatgggttaaaccaactactcggtacttttgtggctgccatcgctttacgaatccattgttttacgttgcctgtcgctttttctccgcttccgaaaccgccgccaaaatcatctatttgcttcttgacgaagccgaccattgacgacttaatcttttcataggcccctttcgccatgttgccgaatacgccggagatttccggaagcttcaggccgagactgccgacgactttcgagactaactttttcggatcggaaacgtagtcccacacgtcaaacgcgaattctttaactttgttgacggcacctttcgcgacattaacaacagcgtcttttgcacccgaaactgcatctacgcctttttcgaaaaggtttttctttttcgtaccgttattgtaggccgggatgccttgcgcaataagctttttcgtcatatcgtgtggaaggacttgcgtacctttcggaagattaaagagcgtatcactgcctgggcttaacccggtgaatccggaaggtgtacggaataactcagggccgccgccatcgcctaagatcgccgggccgcctggatgtccgcctgctgacgtacctttcgcgtatctaggaatctctaacttcggaatatagtgttttttatcaacgccgattagtccgaggaccttgttgataccgtcttgcgttaaaccattgacaattccttcgatgccgccaagaagtttattacctaaagatttaactccatccatagccttatgcgccatgtttttaattccatcgcctatcttaccgggaagttctttagcatttgtaaccatcttgtcaaaagtttcaaccgcaaaatcttttattcgtttaaagaaatttttagtatttccccacaaagagttccaagcacttaccgcaccgtcgactactttccctgccaggtttttaacagttccccatatactgttccatatactcgttagaaatccccatatcgcattaaaaacagaagaagttacagactttattaggttccacgcagttgtaacaactaataaaactaagttaacggcacctttaataactgatgtgataatcgaccaaacgctcgtcaggattcccaatacagcattccaaacaccttgccagtctccttttaataaggaggaaaaaagattgatgacattagttactatattaagcgcgccctgaatgacttttacaattaccgggaacacaatctgtacaacttgaaggataaaacgaattgctggaatgactatgttttgaataattattgctacacccttcaatatcgcaatgataactgggactgccgcttggataatcgctagaacaacagggaaaaccgcttgaaccacgttaagtacaagaggtaatacattagttacgagatctttgattacggtagcgagtaatttgattatcgcaacaacaatcggtaatgctgcttgtatgattgtcaggactgcagggaaaatcgcctgaacggcgctcaataatatcggaagtacctgagtcgcgatcaattgaattatcggcacgattgcttgaataagactcaaagctactggaaataccgcttggactacgttcagaataatcggcagtaatgacgtaaacccttcgacgagcaccggaagcaccgccgttacgattgacgtaattatttgtagcattgaactttgtacctgcgcccacacgcttactagcccgctaaccaggctgatgatccccggaagcatctgcgcaaaagcacccgccaattctccgattaaaggcgtaatctgaacgactgcatccgaaaatgcagctcctaaagaacccgctaaacttacgaacgtcgcacctaattgcgcgaaggctggtccgagctctgcaatcgctgcgcctagctccgcaaaagccggctctaacgtagcgagactcgtaaccataacgttcatcgtttccgcgaactccggcgctaattcagcagcgatttcaccgaagtattgactgaatgcgtcaaataccggttgcagagccgtcattgcgctactaattacgctcgatacttgcgcccaaacagtcgttactgaggtgcggaactgttcgttagattgataaaggcggaataaaaatccggacaaactaactagcgcggtgatcgcgaggcctatcggacctgatacgcccgctaaagctaagccgaacgccgtaatcgttggagcgacaatagagattacgccaccgacgcttgagaaagccgttttcaattgtgcgaagaataacccagccgcgtccgatactttagctgcgactccttggccgaagaattccgaggctttctgtccgagcgagtaaaagaacgcacctattgcagcgatcgcaccattgaatccgctctgaattgcggtacctatgttgaccgcgccggctgcaaatccgttccacatagccggtcctttttcgagcaagtacgctgagactcgatcgacagccgcaatgattccatcaaacgctaccttcgcgccgttgtaagcgactaaggcaccggatttgattgcgttaaacactacgcctaaaagcttctgtaactgctccgaatgtttgtatacgagcacaaaaacggtcactagtgcggttatgcctgctattgttaacgcaattggactcgtcaaggccgctaatatcgatgtaaagacgcccatcataccgcctgcagccgctatttgaaccgatagtagcccccatgcgattttcaacgaacctaaaccgacgagcgcacctccgattcctgctaacaaaacgccaaggacggtgacgacgcctagaatagctgctgttaccgctagcgtgatggtaacgaacttctgcatacccggcgataaattattaaacgcgtctacaactttttgcaaaacggcaactagcgcggatacggccggggttaacgctttaccgacatttatttgtgccgtctcgaatgcgcctgataactcttcgatccgtcctttcaagttgttcatacgctcggccgcaacgtctgccgctttgatcttatccattgcatttgccatttcggtaaaacctttagctccagacttgccgaggattaatgctccgcggatagcgtcggaaccgaaaattttgtacagtgcttcctgtttatctttggctgacataccatccaaggccttagagagttctcctgatatctcggtcatacttttaatgtttccttgagcatcgaaaaacttattgtccatcactccaagtgcaatcgatgccttagaaaatgctttttcaaatgaggccgtacccttcttcaagccagttgtcttggtgacgtatgcatccatcgctttgtaaatatctccgagatcttggctagctggtttaaatccctgtttagccaaagactcaaatgcttttttcgtatctaatgaaacaagaccgagtgactccattgttgtgtaagcaccgtctgtcatcggcactaaacgacttaacattgttttcagtgatgttccagcatcagatccctttagcccattctgcgcaaatactgcaagcgctgtagatgtatctttaaacgataaacccatacctgcggctaccgctgaagtcatggacaatccgtacttcatttctccaacagaagtagccgaagcattggccgctcctgctagaatgtcagcagccttggcaacacttaaattatcgtctctgaatgcattgagcgcagtagaggcgatctctgcggcgtctgccaattcaagatcaccggctgtcgctaaggaaagtgccccagaaaggccgccgtccatgatgtcttttgtagatacgccggctttaacgagttcttccatgccttgcgcagcctctaacgcgctgtatttcgtatctgcaccgagtttaaccgccaggttcgttaaagcctcgctgtatttattcgcctctgccgggtccattaccgatttaacgttcgacatttgctgctcgaagtccatcgatttctttgtcgcgaggccaagagctccgctgattgccaacgtcgctacaccaaaagacgtcgcgatttcagagccaatcgactgtaatttaccgccgatcgtccgaaggttttcgccgctctcttgagcttgcgttcccatgcggtgccacgcgttggcctgctgttcaatctgcgtgttagtcgctcttaactgcgcctgcgtctcgcgaagctgtgcagtagcttcgttcattcttgcgctaagttcttgcgtttcctgagcgtcttcgccttttgcgcgcttggcttcgagatacagccggcgaagatcttttaagcgttgttgctgaagatcaatcgatttatttaagtggtcggctttctgcctcagttgatccgaggtcgatccgaagttatcaacgccagccgttgtcgctttgaacgctgcatcaagcgcacgcattttcgtcgtgatcgtattgacgctcgcacttagtttagcgcccagttgtgcaaatcctgtactctgctctctaatccgtttattaacgaggtcgagttggtcctcggttttcctcatggccgctaatgctttgttgtactgcgtcagtaaccggacggaggcagccgcatcttttcctttcgtttgaacactttcttcgtactggcgcttaaggtcggacagcttcgctttgtgtacctgaagcgtacggttaagcacgtttgctttctgattgagagtatcgagactgttatcgaatttacctgcaccggccattgttgccttgaactcactgttaagcgctccaagtttacggttaatatccgcaaggcctcgcgtcaagtctgcgctgtccaatccgatactgacgcgcaaagcgccgagtgattccgccatgctttacctcctttctaaaaaccgagtacctgatcgatatagacttccttcttcccgccgcttgaaccgccgcgcttgttttggccgctatcggaatagtgcataagctcgaagaaccaaccgatatccatttcgtcaaagtaatagatatcttgtggacgctccatgttatcgagataaagttttttaaggtcgttctcaagcttttcgaggaagtctaacgggaaaaggtaccccggcgttagttttttgccggagtctccgcagtggcttcgccttcacctttcgcagcttcagactgttcaacgcctgcatttaccgtcccgacaacgccctgaatggtatcggaaatagttggaatcattttttcggaagcaatgccgtcgtagaattcgtcaagtgagaactggttgtcataaacacgaacgacgtaatcaacgaggttatcgagatcgccgacatctagttcgtcaaaattgcttgttttcgatagcttgatagcttcgcgaagcattcttcctttaataaatggtgcgtgaaataccttttcttcacctttgataagtaatgtaatttgcatgcaaacactctcctaatttgttgttttttgagtgaacaaataaaagagagccggccgcagccgaactctccgatatgaatctattactcgcctgaaggcggtgttccgccgccaccggtagatgcggaaggctcgtaaactttcgtgaaccattcgttaataaccgtctgattaacgccttcacctttcgtgtaaactgaacggccccaaacgccatcaaactcacgacgcatgaatgttccggaaattgaatccgtttggaattccggactatccgttttagtagcgaactcttcttcctgtaactggaactttcctttatatagcgcgtaaagcttatcgccgccgcccgatacttgcgatttaaagagtaacgcaccgtatggcgccaaatcggtgtctttcttttcaagtacgccatcagcattaaccgtatgtccgagtaataacgcctgaatgtcgtgggacaactggtcaacgccaatctctacctcaacacctccgaaagccgtttcaatctcagacggtccatcatccgcgttcaaagtttcgctgtttgtgttcggtgaaatagacgcttcaatcgccttaccgatcttaaccggtttatcgtaagtagcgcccgcttcatcgtccttaatcaatttcgcaaagtaaatatcgcgtaatcccatgcgtgttcctgccaaatttattcctcctccgtattttgcgcataataaaaacggagaaccttgtgatagatctccgtttcatgttcgtataggtcgtactgccctaagcgcccaaagcccgcatcgacgagctgtttcttaacgccagtttctaaccgagcgtattcgcttgggtccttcgtataaatatcaacttgaacgtaaaatcccgttgcttcttcagcgtcttctgcattgagtgcgctcttttcgtcgtagaagaaaaaacggatatacgtttcatcctctccgcggtacttaaggaaaacaacgggcacgcccaacggtttaagcgccgagttaacgattgcccgcgcactcatcgaaataactccctttctaaatagcgtctgatctcgcgctgtgcttcgttctttttcgcgttgaaagacggctcaataaaaggcatcgcttggtgtcccgggtgatcgacttctcttccgtagaatgtagatccatcgctcatgacctttttgttcttcgctttttctaagtgcggactggtaccgaactcagcgaatcgcgatataaaatcaaggtcgcttggtccgatttcgataatgtcgttcttaacgtcgctgaccaggatcttactttgtgcgctaggcttccgcgcttccatctcttcaaataccggcttagcgccggcctcaagcgcgcctttcttaacggactgagattcccgtcccatccggtttagcctcgccatcagctcgcgcatgcctcttacgttcgatcttgagctcacttaacgtcgacctccttcgcaataaccgtgaaggtaacgtttgcttcgttatcgttgataatgctttcaatctcgaactctcgtccgtcatatttaacgcgcatcttgttattaagcagcgccttaatccgcttggaataacgaatgataaaacgggtcgtcctctcggcctgaattgtggctgccgcaataaattctcggccctgtaacgtctttactgccgaccaaaccgtggcaaccggcgtccagccatctatctcaaacccttcgtcattcgttgtgtttgcgtattgcaaaaacgtgatccgcttattaaaacttccgatgtttaccgccatagcgctcacctcaattgaaggatcataccggcgatttttgttccgctgttagctgtcgtcctgttttcgtaggcgtccgcaacaaagatcagtgccgccattttgtacaggtccgattcggtatcctttacgcctgcgttttccatgtgcttttctgctgcggaaataaaaaaggagacgaggttatcgtcctcatctccatcaatccgcaagtattcttttgcttcatcaagcgtaagtgccatcgttattcacctgccggttcgttgaccgtaatagccaccgttttcttaaccgaaggtttcgacttagacgcgacagtgatcgtggttgtgccagccgctttagccgttactaacccggagctagatacggttgctgtcgcggtgctgctagacgtaaaagtcacgctttggtctgcgcttgaaggcgtgaccgttgcgttaatcttatacgtatcgcccaccgttaaggtcttggaggtttccgttacgttgacgcctgtaggttcggtcgctaacgtagtcaccgaaagctcggcgctaagtggcgacgggtcaccggtgttaggaattgcgcgcacctgatacttatacgttgttaattgcgtcaagccgctgtctgcaaacgatgtccctacgcgagatccgatagatactccgtctctgtacacctcgtattctttaatgcccccattgaaggttacggcgtcccaattgagggacaccgatgtgtctttaggagtcgccgttaacccttggggcgcattagggcgtagtttcgactttcgcgatacggaatgcagatttaagtttgattttgtgatcaaaatacgcagtcaatacgaatacgttttcgccagttttaacgtctttatcgctttcgtaagtgatcgctggatcgtagttgaagtgagagtaacggaagtcaccaacgatcgggctaactgcggcatcagagaagacgaccggcttgccgagaatttgctcaggttgtgcgctgtacagtgtggcgttaccgttcgcaagagtttcaacgatattcatgtaatcagagtagcgcatcatgattttagcgttttcgcgataatcttcgtgaagatctgcggtagcttgcttaatcgctttgtattgatcatccgcagtgatttctttaataccagcagcatagaaggacatttcttcttcgccagcaatcggagtcgcagcgaatgcaactttcttttctttcgcagctaaaccggattgaagagcgcgttctacagtagaaactagcgcagtgtcagtcgcagctaggatcgtctcagatacgagcgccataaccttgaatttatgacgaccgaaagaaagtgagctgccttctactttcaattctttagcagtctctaagtcctggatgaaactatcatcatccagagtaaaatctactttaggaagctctaagtttgtaacgttagtgtacgtagatacttcgcgcagtgggttcttaacgaacggctcaagcagcaattcttcggaaacagttttaggaagtaatttttctccaccagttccgttaccgtcgcctaatgctgcgcgaacttcttgcgctggaacttctttacgcatagtcgcacggattaaacctgctttagcagatgttttttgaatctttggatcagagctcgtaaggccttcggatacgcctgctttagcttgttgtaagcttgcttggattttagctttttgctcgcgctctaaagaatcgtgttggttttgtagaatatccatacgctctttaagatcgtcttttttctctttaagagctcttacatcttcgatagaagcgtttggatcagctgctttattcatgatttccttctcgacagatgctagttgagtacctacagtatttaagttagccttcagatcaaatagttccattaaataattcccccatttttgagttttagtaagtttgtttgtgcttccgcgataagctgctcgcgttccacgcgctctctttccgcctgtttttcgtcttcttccgtttgattaagtaaagcgtccggagtattccggtaactcgcgaataacttcgtatctactttcgcagccacttgttttggagcttcgatactgtcgcaaagccctaattcgaggcattcctgcgctgtaagccacgtttctgcgtccaaaagagcgattaaacgatcacgatcaagcttttcgcctgcctttccgagataagcctcgacaagactttcgcgaatgcgatccatgtcatcggcctgcttgcggagttcgtccgcgtttccctgcgctaaggtccacggattgtgaatcatcatcatcgcgtttgcgggcataaaaatagcgtcaccggacattgcgatgacgcttgcgatactggccgccagcccgtcgacgtaaacgttaacgtaggctttgtgccgctttatgatgttatagatcgaattcccttcgaaaacggacccgccaggcgagttaatatagatatttagcgttgaaacgtcgccaagttcgtctaaatccgccttaaaagtctgtgctgttacttcatcgccccaaaattgagccgaactgatttcgctgtaaatgtaaacctcgccagctttagcgtcattattcgccgctttgatttcccagaacttctttatcgtcctcacctcctttcgagtcttcgttatcatcttcgttagtttttaacgttggaggcgttggcgcgtcggcgctcgtaattttctgttgcgcgacttggtcgatcgggaataagtctttgctcaaataaagcgtatctccgcccttttctggcggcaaatcctcccatgcgcgcacctcattcggcttaaaccagccgctccggatgcctttttggtagaaatctccgcgagtcctcatgtccccccgcaataacgcgttcatgttgaacttaaaataataaccggccttacgttccttttcggtcagtaattttcggttaaattctttttcatattgagccgcgataggcatcagcgttccttgtacataatcgatgtaaagctgctccatgttcgatacgcttccttgcgtttcgccgagcatgtataacgggatattaaaagcctgcgcaactcttgaacgtgttaccttttcgacttcaaacgcttttgtatcgatgaattccttttttaattcgcgtatttttacgccctgttcttgaattaagatgccgccgttatctctatagaagcttttaaagttctcgagcatctccgttttccgcttctcgtccaactgcgtagctaattcgagaatgaacgatatcttagcaccgtccatctgttcgagactgaacgtccttacatcgcgatcaaagtccagcgcattccgcaaaacctttagcggcgagattcctttcagtccgtcaaccgacgtatacttaacgtgaatcatatccatgttgtgaacgaaatagtttccgttatcgccgaatatctcgtaccataactcacgagacgtttcctcaatgaccggctgcactcgcgaagggtctaaaacgtcgagtccgacgacttcataacgcattccatatcgttttatggcgtacgcattgccgtaaaccgcccgatgcgtctctaaaagcccgatcatttcaccggaagtcatgttatggttcggcgcgtacgttaatagttcggatgcctgcgactcaatcggctgataattcttgtacgctttgatcggcaagcttgccatcgtgtttgataaccgcgatacagccgaaaagactgtttcgttatcagccaacgcgtgctcaccatagtttccgaaaatactagcgcgagggataaaccagtgcgcgagatcctttttggcggccgcctttgcttcaggtgcgcctctgaaaaagcttcgtaagttactccaaaagcccaatttcctcacctcctaaccgtttaatagatcgttaatcgagataaatccgacacttccgcctgcaaccggcttcgtcatgtcaagatatacctgcgaatgggcgttaaggaacgcagcaaagccgtctatctttcggtagcgcgtctgcttggtcggcagccagtttccgttacgatcctcgacgagtttgacgttgtttaagtaccacgtgaagagtttgttttcgttatatacgactcttccgtcgagtaataattctttaacgttcttcaatggatcgctcagcgtaatgtaaccctgccgcacgacttccgtttgaaatccgtaattctgcaggtcttgcaccaaccgcatcgcattcgccgggtcaaacgtgatcttttcgatctgatatttgcgcgacatttcaacgaaccaatcgtaaacgtactcgtattccacgtattcgcccggaataatcgtcaaataaccgtcggtttcaaacccacggtagtcgattttttcgttatctttttgtacctttgccgccgggacccacgaatgagacaaaacaaaaacgcgattatccggcaagatgaattccagacacgcgctcgtaaagtcttccgtttgtgataagtcgaagccgccaatgcatctcatgccacgcaacgattccggatcgacccgtctgttattgcgcttgatgacttcgaagtcaataaagctttcttcgccgttgtcaacgaagatattgaaccgcttgaccagccagtcgttgtattcgcgtggtacgtgtcggtccgcgttaaagtcttggatcattgacggaatatccatcgttacaccgatattggggttcgctttgatccacatttcgggattttcgacctcggatatgtcgtctaattccgccataaagtagaaattacgctcctgaacgttgcttccgtcaagaacatcggaggcaatttcgtaatattcgactagaggtccgtcgagctgatagccggccgttgtgatgtaaatgattaatggctgggtccgcgcagcccttgagttcttgattacgctgataagcttcgaatctttgaattcgtggatctcatcgaatataccgaggtgtgtatttaagccgtccaacttttcgctatctgacgcccgcgcttcgatttgactcatagacgcgtcgtgatagatgcctttctgattctcgcgaatatgtttccgcagctttggcgatttcctaatcatggctcgactctcttcgaaaagcacgcccgcttgctgcttcgagttggctaaaacgtaggctctggcgcccggttcgccgtcttttgttatcgcaaagttggctaaaccgctgattttcgttgtttttccgttcttacggccgacaaatatcaggccttcgcggaaacgtcgtagccccgtatcgcgatgaacccaaccgtacagcgatcctattacgaagtgctgccacggctgaagcgttaagtttgaataacggccctgtgacggcttgcagtaccgctcgataaattggatcggacggtgccctttttcttcgtcaaagacgtaagggaattcgtctgtaccggcgcgttcaagatcgcgaaggtgacgtttgcaagcaagaatatttttcttactagcgactatttcacctgacgctaccttttccgcataccaagtcgtcagcaacttttcggacggtttttcgcgtataaatccggctattttttgcgtttttagccagttttcgtaccatttttcgacctctgtagcgttagaatttactgaaatcgtcgtcatcgtcatcaccgcctgcgtttaattcttttcgctgcgccggcgttagatcgagcgacttcagaaggttatttaatgtcgtaaccgtcttcgtaagctcaatcgctaacggatttttgacgaggttttccgcgcctgccttgttcgtatgccgcatcattaaagggttttccgccacttccttttttaatcggcggtagaacttatgcgtatcgatataaagttcgataagctcttcgtccgattccgtatacctgtcgccaagatattcgcgcagcctttttgcagtgggtaccgccataggatcgctcctttcgtccggggatttaccccctttaatgtaaaatttccggtcgcgctacaagcgaagtggccccgccggtccttacgtttttgccttcgaaatcccaacggtaggggggctatagctccggattagcctgcgccttcaccacgtttattctgcgcttcttagccgttttcgtagccggtccagcgcctttttccgggtgccttcggttgtggcacggattgcacaaacttacgagattttcgagcgttagcgcgagttccggatgatcgcgcagttctttgatatgatgaaccgtctgagccttcgttatcttacgttctttgagacagtcttggcatacgttgtggtcgcgcgtaagagccaacgctctgcattccgtccatgccttcgacttatagaacgctcgtgcttcgggatcgcgcttgtgtttgtcgtagtagttcaaggcatcgcctcctttcgcatactaaagcgtcaatcactctacagtgacttaggccttcgtttgttcttattattcttttaagtacaatcgcgataaggtacttaatagattactaatatctgcgtatcgtatgagcgtaagcgaatagaggcgctattatttgtttgttattattagttcgttattattacgtttgttattattaccgtcactctacggtgatttacctaaatcactctacagtgattaacgtaagtcactctacggggattgaccgtatataacgtccagcctccgccttacctccgcatcactcagcccgctgtaatattgcggataatataacttctcgcgcttattcgacgcatagtcatacgctgtctttagtagccctaccgcctccaacacgttagccaaccgcgctatcctattgcgccctatccccgtatcctcagcgatcttatccaccgaagggaacgcgctcatataccggtcgttatcaacctgcccgttcacatgcgcaagtaagtacgtatacaattgcgcgatggctccgttacctttctcgtattctctcgcgataggaaccaggcgccgccataaatcatgcggtataggtgcattacctgtcaggccgttttccttctgcatcgcataagctttccgttgcagcgactcctgcgccaaatgttcgaattggcctcgcattgactatcgacttcctttcgttaactaatcgcgctacttactgcgccctcgcattcgcctttctggcgtcatattcgtcaagcaaagcgccaaagtcggcgtctctctcaaatacccacatccggttattagttcgcggatgtagcttcgtaaatttatagcggcggccattcgcctttaagaagtgcatgagcgttgttgagtagcagtaaaataatccgttcacttaacatacctcccagttaattaaaagtcgcgattacgcatcgcatacaaaccggctataatacggcgccgttcgcttcctatccgaaagccatcgtaccaataatccatttgccgtatgactcgccgcatctctacattgttagccttacgtaaatgttccggtgcataaccattgtcgcgtagccatattcggaacgtatcgtattgcgttttgtttaaggacggccgactcactctgcgccctcctctacgtaaatcacttcggctgccaacttaacaagccactgaaaatgcggatcttttacgattgggttttcggcataaccaggcagcataaatagcgttgcattttccgcgttgatgccgtcaattccgccaggtctacgcgatacaaattgcgtgtacttaaagttcggatatttcgttttcacacgtttccataccgcctgagcttcgttaacggtccgtcctacaacgagagctgtgcgccatttctctttcggtgcgaaaaaggctcggtgcaacgtatcgagctgttcgttgaattcgtcgctggcggtgagtttaacggttatcttttcgctcattggcgctcagcccgttttattttctctttactagcagaagcaaaatagaaatcgaaaatgatagcaagtggaaacagcggtatctttattagcgtaatgactaacgcaatcagtaaagtcgcggccgccttttctttgtcgacctgctttgttcgtaatagttcacgtagctcatcgtcagacgatccggatacatataaagacgcgatcgtaaatttaaacataaggcccgcgtagatcattccggcaatgaggtaaaccaatagcgcccccatcaacgatcgcccttccggaagcttactcggcgaatttctttcccgtcgagacacaatccggcatcatataccgcctgctgctcctcccgcaattcagccagcgccttagtcgccgcctttgcttcgcgctgtagcgctttgaggccggttattgcttcggatacctctacgtttacttttacgttgatgtcacccgttgcgtagatatttccggtttgagattctaggctgaattttggagcttgatatccgtctaataaggagtagcccggtttgtttgtagctacccccgccattactgaatttcttgttgattcgcgtttgtccgccattcattttcctcctttaattaactctattagctctgttgggacttattaaaacaagagttgtaatatctgctgtactcttctacactcatacaattaactttggctaaatagcttattaagttgtcaaactttactgacgacaaattaaatcgatctttattagcctcaaaccactcaaagatatttgagttatatttactaatatttagttccgagctaagtgggatcatgtttccttttgttgttcctccgaatcctgtactcagcggtattacgtgatcccaatgtatatttgaagattttccagttaaggcacatccgccaaagtaatcttgtatcttgagtttatctgcctgagttaagtcatttggaaggtctttaactttagcgcgccttttttgattctgtagaataatgcttattgagtttttcttttgccatctcttcttcagtattgcgtaatgctctttgcgggcagagcagtatgctcggctgtattcagctcttttttgtttgtttttcgttctgtattcggcgtccctcttcaatttacagtagttacattccgaactacgtccggcaaatccttgggattttcggaaatcagtgagagcaaaaacatcaccgcacctcctgcaagcttttgcgatcacctgtcccgagtgagactcatagtacctggttcctctactagttaccttttctgccaaatcgggatgcattctaaaacgcctcctattcggcagtctcgacataaattttcacagggcctgggtatacgtgtctcgtcatatcaacgtcgatagttgccacttctgttggtgacacttcgataacctccgtcgtttcttcgctgtttaatatggacctgttctctcgcctaatcgcagatataacctccgcaatctctttgcgcaccgcatgtccggcagactgcagcgcaatcaggcgatctagatatgcgaacaattcctctgtcttcgtcatcttcatcgtctccttttcgtttcttaaagcgcgcttcaacgtgaaacccgctttagcacatacgcaagcacgaaaagaccgccaaaatcgttggcagcctcgtcctgtttgcggaacgtacagtaaaaacggtagatctgcgtacaggttgcgatcctatacggtgagacagtgtttgcagctccgttttccgccggagtacgcaagcacaaaaagacctccgccgtgatggcggaagcctcgttctgattgcgtatgttggcttttagcaagttgcgataacttgacacgccgccttggctattcgtttattatgcgggcgaggatttgcacctcgcataagtttacggccctccggcttgtctgcgtctacctattccgccaccgcatccgtgatttgcccgtatattaacggacgtagtaaatttcctctcccgactcagccgcaacacccgctaattccgcaagcttttgaaaagctacgttattgactaacggtcctgcctcgcattcatatccacaatctttaagctgctcgacgatttcttttaacgtattaaattccgccattcgattcgttcaccctttcgtaagtcttttcgaaaatgtccggcttgcacgggtaaagttcgtcctcaatgccccgaataatataatcgcctacttgcgcaatgacttcgctactcggcgttataattttgagtctattggatgccggatacacaaagcaccgttctttgtacgcctcatccccgataaatttccgtagattatctatcgagtcctgtgtaaccccgccccattttagcgcttctatttccgcggcctttctacgatatttcgtcatccttccgtcctcctttcgaaatcgcacgaaagtagcgtttctgaccactaccctatcgaatactctccggccggattaaaacggctgtggcgtacttatttcgcttttctaacgtttaggatctcgcaaatgtatatatccgtttcgtcccaataatcgtcttcgtctcgctcatcaagatcgacgagcgcttcttcgtatgtgtcgtatgtgcaaggagccggatcgataatagaatcgctaaatactacgtacctcattcgcgaacacctccgtttgatatagcgccgcaatatgtattaaaaggacgccaagttgcggctagtgcccgttgttattccgtaggggtggcgtcctttaccgtacatactgaaaacctcaaacctcgatcgagcttcataacgtaagacagcatattggacactttaacaagtatttttcaaataaaaaaccaaattgttttcatccagtaaaaatcaccggacaacgtaatttggcttctctttatattattaaattctaatcgcgatcaaggtgctaagtaattaatatctgcgtccgctaatgagcgtaagcgaatagtggcgctattatttagtaagtctttataagtaagtatgtatagtaattctttatacgcagtgaaaattactggaacgtccggtgaaaatcgctgtatgatccagtaaaaatcaccggacaaatccgcctatgcccgcatcgacagtatttttcccgccaggaacaatccaacgaccgccttccgtttcagcatcgccaagtataaccgcctcgcccagctctcctcgtgttgcagcgctatcgaaaccgccttccctacattcggatgttcgactatgcgcttaatcagcgtcaacttttcgcgcactgttttacggcagcccggtttgaattcgttttgtatacagccgttaaccgcgatataacatttccgccgcgccagatctaccgcaaccttttcgctatacaagccccaccgttttgcgtaccgttcgagcgtatcgctatcgatgtacgaatcgaatagctccggattatattctcgcatcaaactggcgtcattgatctgccggtaatggtacagcggcctgttgatatagtatgccgtctgacaatacgtaaacgcgtccatgttgaacagccaatcttcgccgaggtacttgccgtcagggaacgatatgttatgcgtatcgagcatgcttctgcggattactttgccgacgccgccgtacgatccgttatataagaaatccgttaatatagtcgctttaatctcggcccgtccgatcggctcattcgcttttgcgctataacttttcgtatagcttttcgtctcgtcttcgtaatcccaacgcatgtccgtaaacacaatatctgcgttgttttcgcgggcagcttcgtacataatcgcataagcttccggctcaatccagtcgtccgagtcgataaacgctacgtattcaccacgcgcctgcaggtcgaggaggaaatcgcatgaaacgtttatttaaatcaatcgtaatcaccgcggctttattgacgagtactatcgccttagcaccgcaagcagacgcagcatggtcgggctggcagacggagaagttcggacataaagcgctcgtctatacggatgcaactacgtacacaagcagcgcaaagtcggtcgattggaaggccgaaaagaaaggcgcggccacgctttattatacggccggcgtatataaaaagcgttcaggtggcgggctggctgatacgggtttggtgcagcgcggaagctttaagaccgcaacgccgctgaagtcgtttagcgtaaagtcgattcgcggtaagactggcgctggcagttacgttatccaggtcgattgttatacggattcgggcaagcgccattatgtcgggacttttgagtcagcgcgtttcaacgtgaaataagcgtgtgtgagccgttttaagctgcgaggtacttagtgtacctgatctgcgctaaggcggctctttcgctttgatttcgtggtataatcgttctatatggaggtttaagcgatggaaacgaaagactacgaaacaaaaggatacgatacgagtataacgtacgaatataaggaaatgccggacgtacgtgctggtcgttgcgataactgcgactatacgttgtttaagagttcggttaagcacgggaagtttttgcgcgaatgtagaagatgcggtatgaaaaagaatatttaaacgcaaaaagaaagacgccttaataggcgtcctttttcgttttatgctcctctaacgataccctctagcggactagctccccgtggcattccgtataattgcggccctgcgcccggatttaattctcccattcgcctcacctccgatatagtaaaattatatcacgcgagctttccttttcgcacctatattcgaccatatcgcgtcctgcttccgtttattctcggcagcttccggaaacatgcgaaaaaactcggcttcgtcttcgatgggcttgcggaaataatagacgagattcttcgcgccgcctccgttctctaccgtctgtataagttgcgcctggactagcgttttgaccgcgttacgatacgttgagtcgcttatagccagcgccctagccgcctgttcttgcgtcggaaaggcgtaaccgtagtccgcgttataaaacttcagcagaaacgcgtataccaacacggcgttaccgttcagcttcggaaagtattgataatgcgtaagaataacgttaggtatgcccgtatagcccgccgcagtatcaaacggtagggccttcgctttatcgctcatataatcgtcctccacttaaataatattcgacttaagccggcttacggcgctgccactccgtcaataaacgatcgagttcgggcgttcgcgcatattgccaaaacttccgtaaagtattttcgttcaagcctacgcagatatatcgttggttatggtcgcgcaggaattcgtatagattcgcagaatagcagtaataatagccgttatgcattcggtcgcacctccgtaattagataaataaaaaggcgcctatgcgcccgtatgctctaccctttcgcctgttgcgatattgaccgtaaactgaccgtccgtgcgtccgttaatgaaatcgttgtagcgcttgcggcgttgtttgtttagagatttagcgcgcgcatcaacgaaaatagattcgtaggttgataacgaccggcgctttggttcggcacgattgcgaccgttctgatcgtattcttccgcaagctttccggatcgttctccgttcttgcgcgtcgtttccaggcgttcgctcatgatcgggtattccgccttcattttatttttattcgtatcggttaattcttcgaaaagtacgagatctgccatgcgatctaacgcgatggagtccggctctttgtcagtcgcgtccatataagcgtcagtaagcgctgtgattcgttctaggcgcgctacacgatcggaaatatagatggaccgcaagccaaggccggcgtgatcttccgacttatacgcaacaatttcgccatcaaccaatacgcgatcgccttcttgtggctgtccggaaacgcagcgccaagctaatggaccgcccgtcttataatcgtgtctgacgtcgagctgcaattccgtaatcatttcgtgcaataaagcgttatccattaattcgtcccccttatcgcgtagccttcgccgtggctcgcccagtagtaataaacatccgttaaactatcgacagctgcgtttaagtgaaatacgacggcttgttgcgcaatacccatccgttcgcccgcctcggtttgcgttaattctccgaagtaaacgagctcgatcgcctgccgttgccgatccgttaagccggcgagctcgatcgctttatgaatatcgatcagcacttccacggccgcatagtcgccgcatcgcttccggctgacgaacttctggtaatcggcgagtaatagcttgacgccttctgcgttatcgagcgcataggctgcgtcgaattcgcgttcctttcggtgtagatcgattttggtgacgcccattcgtaaaacctcccgtctgcaatttagtgatcgcgacacccttccgtatagttgcgaaaaagtgatgtcgtataagaaaaggctgcgttcgcattttgcactcctgttccgatgaacattttcgaaaaaaagtattagctgaggtcgtttttcctttcgttgactccttcgttaatttcgtttatgattaacgtaaacgcttacggaaggagtttcatttatggtccttacgtggatatctaacgactttgagcgcaacctcaaagcgtacataactatcgaaaagcagcgccgtctgtttatctcggcaggagctcgccgtgtaatcggcctgcctacggacggtccgttttatcttgtagtcgcatatgaaccggagtcccggcgcatcgtggtcggcaagcccgaattagtaaaccaaccggacgttaagccgttcaagttcgataagcgcggcaacgtatcagccattccgttcttacgtaaggtcggcatcgatttcgacagcttaccgcaacgctattacttgatcggcgatggtgaggcgtccaaacaaccgtatttggcgtatccttcgcatacatacgcgtttcagttagacgctgacgctaattgatccgccaaggcacatccgatataccacgcaacacgcgaagcgattccgttaccgacaatccggtactgtgccgataaggagatatcgtctggcaggacgtaagtgtctggcgcagattggattcggagacactcacggacagtgaaacggcgaggtgcttcggtcggatggatcggctggccgctgttatgatgcgccggaatcgtattagacggtttatctagcgattgcacgcggttagcttggccgtacgtgtattcgctttttggcgcccaatacttcccgcagtcttgacgttcgggttccggtaaatctccgatcacatcccgcaatactcgcgtctgataatcgccttctaacggcttcggaaactcaaacgtaaatccaagatccttccgcacaccaacgataaacacccgctctcgcttctgtgctactccgtagtcccacgcgctcagcgctttccactcaatctcgtaacctatttcgttaaacttctcgataagcgcatcgaatgtaggacggtggcgcttcgttatcaatcccttaacgttttcaaacacgaaggctttcggctgctttcgttcaatgatttcgagataccgccatacgagtttaccgcgttctccgtctgctccggcacctttacccgcaaccgagaagtcttggcatggtggccctccgaaaacaacgtcggtatccggcaagctgtcgatatctactgcgctaatatccgcctgttcaacgtaatcaccgaagttgtgacggtatgctttaacggcgttcttatcgaagtccagcgcctttacgatatcgtatccggcggccgtaaagccgattgcgccgagtccgcctccgcagaataattcgagcacagtcagtccgttcgccggctgttgcggcgttaaattaaagtcgcccatgtattcgctcctttcgtgttcctctatacagcatgcgttctttccgccagtcgttgaagcgataactgtataggcgggcatgttaattcggcttactgatgccggcctacctttccgaccctctgtccgtactctttagtcggcacagcaccgtaatgattcggaatctccgtcacttaacgcccacctccgccattaaatcgtccaacttcgcatagagctgctcgtacgtcccatcgttcacgatttcgtaatcaacttcgaaagtttgcagcgctttttcagtcggatgatcgagcgctgctaaatcgaaatcgtcgccggccttccgtgcgcgttcaatccgtaattcctccggcgctgtgatgcggacgatagtaaatccttcggcgcgcagccggtcatattcgttctgctgccgaacgtcttcgatcagtacgcgattcttcagggacggtgctaatccgcaatcacatttgcgagaaaagagcgccgtatatgcgtcgactttcgccatacatgcggctatccagacgttctcgccgagtatcttccgcaccgcctgaccgaattcttgataatacccgcgcggcttcggcttttcaggtacggaagggaaagcgcgatgaaaggcggctttgagttcgtcactgaaggcgaacgtttggaaatcgtaatgcagcgataaatacccggcggcttccgacttgccagcacgtaatggcgcggttagagcgagcttcatgggcgcatcaacaacctttcgataattgccgccaattcatccgcggtaaataacttttcgcctttaactccggtcgcactttcctttaaccgcgccaattcctcgccgagcgtccgtttgtctttaaacagcgtgtcgatttcgtctctatggcgcgcttgttcgcgtttaagcgattgaatattatcgagaacttgacgtctttgtagaacgtctaacatacgttgttgatcgctcaccttacgcttcatttccgcaacctcttgcgctaaactggcgataacgtcgattgggtcggctggcttcggttcgtcttcggcggcttcgaccgggacgaggacgagataatatccgtgagagaatccgatccacactccttcttcgtcttcatacggatcgacttctactccttcgtcatcagtcttacgaacctctctcgcgattccattcgattcaccttcgtacaagtgaataaccttctcgcccacttccgcctcacgttcgaccatttcgtaacgctgaccgtcaatgtgaacgatgtcggtcggttcgagtacgtgatattcttcgcgaaggataaatccgtcaatgttgccaccgcatctagcttcgtcactttctacgtgcgactttcccgggcggtgtcgatcaactgtaaaaacatcgccgttctcgtacccttcctcgagatcatccttctccacaattacgatcttctcaccgacctccgccttccgatcgacctctacgtattcgcgcttgatgccgccaagtgtttcgtcagccagtacgtgaattcttgcgtttgcgtttacgatatccttcgccatattatcgatattcctccttaatattcgatcatattctgatttagctctttccgcctcagcgctgaaccaacccatccgatcacctcttccgcacatatttcgcaaagacttggcgtgatgatttcgtcgagaagttgggcaacgtaagtccagctctcgcaaggtcgtcaagttctcgtttttctcgcttggtcgggtattcgtctaagaagcgttctgtaagcgcgattaaatcctttcgtgttatatccgccaatacatggaccccctcccgttaatttattacgcgaacctgcaccggctgccgcccgaactgtaccgcgtcggcttcattcgcaactaatacgtcaattttggcgcccttaatcgcgctcccagtatcctgcgccacggctttaaacgtcgtgccgtctgcctgccgcacctcaaccgttgagcctaacgcaatcactgacggatcgaccgctatgatgcgcttgcctgcgtgatagatcgtatggctaacgtcgaggccggtcgctgttgttccggtacacccttccgcgcaataagccgtatacgcggtcgcttcgaacgtttgccagccggatgtttgtgcgtgcttatgcggcggattcttgcgcttttcgttagcccgcgccttgacttcgtcttttacggaagcaagttcggattcgagcgcttttatcttcgcatccttggtcgccagttcagcgtccttgccttcgataacagcctccgcctcttggagcgcgtattcttcttcggtaatgcgcggtgggtctggcggtggtggctccggtggcttggcggtcgggttcgtaagtaattgcgttgacatcgctagattcgttagtataccgataaaatcagtcctttcttaggcgctcttttcgaatataaaagaactcaccttcgcgatattgttttcgtttctcttttagcgccgatgcttccgtatcatgaacggaatgtaacgttacctttccgttacttccgaaatcatcggtacagtcccacagaagataaacgtattcgctcacgactcaaacctcctcgaaaaattgcgcagtccatggctccacgtcgaccacttcgcgtcttaacgcttcggctaattcggtaatttccgcctgtgcgccgcgtccctttttacgtttggaatagaacgatagcaacgcggtcagattcgcagtcattacgagattcgttgcggctgcgttcggcaggacggctctcgcatcttctgcgggcactccaagacttctcaactcgtcatatacgtcttgaatcatttccatagcgtctccgaagtggtcgactgcgctaatgtaatgcgtaaaatccaatgacggactgtgatccacttttttatcctcggtcactgtcggaggcattacgtagtcgaacccgccggatctatcatctctccccatccgcacataccgctgtgactggacgctgaagctaaaaccggcgcgatgccgtgtaagctgcgccaataacgcccggctgacgccttcgatcgcaaaggtgaacgagatatgctccaacgtcgacgtgtgtttggatgcgaagatatgtcggaacagccgatcggcatccgtgcctgcaccgccatctgacgctttggaaccgaaatactttgcgccttcctttgcaacgatttcggtcggtttgtttgcgctataacacgatctgattgcggttaaggcgatgagctttccgtccgtcgtatcaagttggctgagataattgaaatcgtagttacctacgctatctaattcgtcaaagctatcgtaaaatttatcgcttaactgcgtatgtgcgattagctgtacgttcattttggtttccgccatttattcgtcctccaatcgttgtaacaatcgtctgtattctcgtttaattgcgtttcggcttgcacctgcgatcgctagtgtgtacaagccaacttcgtgctcaagcttcgcgtactgttcgtccgagatttcgttcagattaacgaacaatccacgcctatttttcgcaatccagcgcaacgtagtttttaacggcttgtgatatacggacatgtgtagcgcaatgaatttcgtcgctctttcgtcaagtattcggaacgggaactgcatagcccatcgcgttttactacttttgcggggaagtggcgccatcacgacgacaccccgctactcccgaagccgcccgcccctcgatcgctatcgccgagcgtatcaacctccgtaaacaccgcctgctcggccggcttgattacggcttgggcgatacgatcgccttttcggatgatgtacgtatttttcggataatgtgttccgtcgatattctcggcctttccgttaagattgcgtaatctaggcgtcgatccccattcttctctcgcaatattatcgataatcactccgacctcgccacgatagcccgcgtcaactgttccgagctgcacgcgtaatttagtattcagcgtaatgccggatcgcggtcgaatctgcatttcgaaaccttccggaatctcgaatgccaagcccgtcggcacacacgcggttgcgcccggttcaataattacgtcctccgccgcgactagatcgaagccagcgtccgttgcgtgtgcgtaggttggcgtttgagcgtccggtgataagcgttttatatttacgttcatttcgtttcctccttcgtaacgtcctcacatataactgcgaggttaggtatcggattggcacgttttcctcataaatagatgcgtataaagttcgtagcctggacgcttattccccgaaataaaagtccgaatcctttagcgcctcgaccgtcgccttcttatatccgttacccttctgcgaaaagaagtcgtgcgatttcgtcttcgtactaagtccgttcatcacgatcggattcggcgtttcgtcctcgaaatacggatcgaacgcgaggttttgcagcgatttattcgcgttatagcgcatgaaccgtttaacgtcgtgcgtcagaccgaccgcatcgtaaagatcctcggcatatgcgacctcgttttcgtacagctccgtcagtaactcaaccgcaaaatcgcgtaattctaactgaatgctatgagcttggcggttataaatttcctgcgcgagcaagccggtataaacgccgtgaatcgcttcatcgcggataattagcgatatgatttcgccggagttcgttagcttgccttgccccgcgaaatataacggataataaaagccgctgtagaacaaaaagctttcgaggtataccgaagcgaccagcgccttatacagcgaaatatcatcgccaggttcaatcgcgttgtacaggccgacgatacgcgctgctttccgctgcaaatacggattcgtcttaacccattcgaatacttcgttaattgtttcggtaggcgcgagcgtcataaagatattcgaataggacttcgcatggactgcgttttccatcatcgccatgaaattcaggacggctttacgttggtggccggcgatgtgctgcgcgatgataggcattccggtatttccctgctccgtgtctaatagcgtcaggcccgcaagtccccgcatgtaggtcgcctgctcggccggccccaacgccttccacgaaaggaggtcgccattaagcgaaatctcttccggaagccagaactgcttaacgttctgcgcgtagaacatttgcgtgaagtcgtcttcgtgtcgcgaccaatcagccgccgtatggattgcgtttgcgttcgtcaattattcgtcctcctttttatatccgtccaacaatgcgatcagaactcccggcggaatattcgcgtaattcataagatcacaacaccgacttgcgtaccttctcaatttcgccagatcttcgtccgatagccgttgattcacgatcataacctcctcttcgtttaaacgacgcaactcaagcatgaatcctgaccggtgtcttttgttcgcgcataatacagcgtcttaatgccgcgatgatgcgcgtataaatcaatccggttcagatctcgcgtcgtcatcgtatctttcaagaacagcgtaaacgaaataccttgatcgacgtgctgctgaatcgttgcgatcatatcgacgactttaaacatatccatgtcgtacgcttccttatagaagaaccaattctgcggcgatagccccggcataggataatacgtcttcgaattgccatacgtacgctcctcgatgcgctccataatcggcatgaccgacgctgttgccgactgcacgtacgaaatagatccggtcggcgcgatcgtaagtctgtacgaatggtaaaggccgtggagcataacgttagtctctaagcgaacccaatcgatgcgcttcggaatttcaacgccttcaaacagcttcgcaaccttttccgttttaggtcggaaatctcccgcgacgtacttatcgaagtagctaccgtctgcatacgttgatccctcgaatccttcgtacgtactaccggtctgttgcgctaattcattcgaacgcaccagcgaccaataattcaccaacgcgaagaatacgttagcgaaatcccgcgcttcttccgattcatatgcgataccgttttgcgctagatagccgtgcaagttcatcgcgccgaggccgagcgagcgcatctcccgattagctcgcgcaacagccggcgcgttcttaatattcgaagtttccgagactcgcgtgagagcatcgacagacagcttgacgatcgtttcgaagtcgccgtttttcattacgttcgcaacattgagcgagccgaggttgcacgagatatcgaggccgatttcgtccggttcgccatagtcggtgtattccgatacttgcgacgcctgaaggacctccgagcacaaattcgaaaacttcaccttcgatatgtggctgttcgcatgctccgcgtttacgttgccttcgaacatgatatacggatagcccgattcggaacgcagcacggcgagcttttcgagaagcttacgcgcgtcgatcttatctttacggacggccgggttgtcgacgagctgatcgtacatctccccgatatccatttcgtctaggtgttggccatacgctttgtaaacggtatgcggatagaatacgtatgccggccggttctctcgcgccagttcgatgaatttatccgggataacaacgccgatggacaacgttttgactcggacgtcttcatctgccgagattttcttcgtatcgaggaagtcgtggatgtccgcatggaatacgttaaggtacgctgcgcccgacccttgtctttggccttgctgatctgcatatcggaatgcattatcgagaagcttcataacaccgacgacgcctttcgttacattctcgatgcccttaatcgattcacctttcgcgcgaatcttcgatagattcaacgatacgcctccgcctactttcgatagctgcatcgagatcccgacggctctttcgatgtcattcaacgagtcgcccacttcgagcaggaaacacgaaactaactcgccgcgtcgtttacggcccgcatttaagaacgtcggcgttgacggctgatattcctggcgcatcattaaatcgacgtactcaagcgccttggttgcgtcgccttccgcgaagaacaacgcacagcaagcgacccggtcttcgtagcgttcgaggatctttttgccgtcgttcgtcttcagcgcatagtcgttatagaatttgaacgcgctcatgaacgaaggaaaacgaaatttatgcgcgtaggccgcctgatagaccgccttgatttcttcgaacgtataggcgtccaggaattcggtttcgtagtattcgttatcgcgtaggtaatcgagtttttcgcgaaggtcgtggaaaaatacggtgttttgattaacgtagtcaataaaataagcgcggacggcttcgagatccttttcgaattggaaccggccgtccttctgtagcataatttcgttattaagttcgatataacttgcgtgtttattcgtcatgagtgtcctcctcaataactacgtgagaaatttcggttttatagaatattgtccgacgtttgtttttacgcccttgtatcgaaaacgttccttttctgtcgtttaacagaagctgtagttcatctccggatagactgacgttgtttattgtatgttcgccaccgtcttttaaataaatcgtaagtaaattacccaagcgcattcaccctttcgataaattgtcgtacatctacgtccgtgcccgctaattcaaagcgtccgattatcagcacgccgtattgtgccgctatcaaatccgcagcctttgcgtaattatccgcccatacacgatttcccgacgcagccacgcccgccaagtacgcgctattagctgtaagaaaatccgccaccggccgcgccacctgaccgaagccatacgtaccggtcacgcatacgaacggctcggcgatcatcaggcccggcttaatttcgacggttgctaggccggtctttgcgacgaatcggcggacgttgccggtcagcgagtaataagcgatcagcattcggaatcctcttcgtcttctaacgaatcgagttcgtcctcaatatcggcgatttgttcttcgatatcgtcaatatcgttctgaacgtcctgcagctcctcacgtaagtcttcgagatcactttcccttgaccgtagttcgacttccaacgctgatagcgcattttctagctcttcgcgtttatgcatccgatctacccctttcgtctctcaatttccgcctctacttcgtccaaacgcgcctgcgtccgttctcgctcgatacgctcctcgatcagtttccgatcgtggaagctgatggcggtatcactttcgatcagtttttcgttaagccagcgtctcatattccgcaaaccttcgtcagttgctccgtgaatcattcggccgttccctccgtttcgcgctcgcgtttatgtgcgcgatatggttcgacgatcagccataagataaaacggacgattccgtaaagtccgacgagaagcaggccgaatacgagtgaaatcgtaaagatcgcttttgctacgggagatgctatcgcccataccagaaatctaatcaacagaaagaacattgcgcccgtaagtatccacgaaagcgtttcgattaatctccgcttaaacatccgcatcactccaagtcgattttatattcggtcgtaatcgtatcttccggaaggtaaaactcatactcctcgaatcccgtactcttaccgtaaaagaatcgagcgaacgcagatttaaattgcacatcgtaagttagaacgtacggcttcgcgtactccccttccttcatcttcgaatcctcaactgcggctttgctaaccgttttaaacccgtctttctcctttacgaaatataaatactgcttttcgtcaactgttccggaaccaagtacgaagcttccgcttgttttagcgttgtctttaatcgagtagatctccgctttatgtggatcgactgttttcgtttcgataaaaaacgatggtacagccgcgattaaaaacacacccacaccacaaaggattcctataaaaatcccgcctaggacatcgaaaaaatcaataaagtaccacgaatccttgattgctagaattgcgacaacaacggtaacaagtaatgccaggataatgatccccatttaatccgcctccccttgttgctcgtcataagctttcgccttcagttcgctaatgacttcttcgatagcttcgttgtatatagaactaagcttgcggagggtctctgctttctcttcgactgtcagcacaacctcttcatccaaagcctctaaaaagtctcgatgtattcccttagcgcttttcccaaacgcctttaattccgactcaatcgtcactttagcgaaatacttcttcatttcagttgatgcgaatacgtcctcgaacattttaatcgggttcatctagtcgccctccttcggtttatcgattacgcccacatgaatcagccacgcaagcccaatcgcagccgcatcgctttcatcgaaattagcgaattcgccagtataaccggtaatgcgccgtaccgctgacgcaacttctttcttttctgcgctacctgatccggctaccaatgacttaacgcgtgttgctgagataccgagttgcggctgttttgctttcggagtcttccaatatttatcgaacgtcagcccgaatcgcgacgtcgcccgttcacacgcgttccatgccgccagcaccggatagttcgaggtcgacgttttgcctgcgaagtcttcccgaaccacatagtcgaagccatctcgcggatagtttttgtcgagaaacatcatcgcccacccttcgataacctccgccctgtgtgcgtgtgatcggctagaattcggcttcacgtgtgacagcgctttgatcgtaggctttcgattgcgtacctcgattatcgcgacgccggggcaggtcatcgacgtatcgaacgcgaggcatcggataggcttggcgctagtcatcggagctccttttcgtcatagtcatcgaaagttattttcgcatgacacgcctgcattttcccgcctttaaagtatttacgccacatatcgccgttatcttcgccttcccctgtaagcgtgatgagcacgtcagggaattgacgggatacttctcgcacgtcttcttcgtgtccgtaccatttcatctcgtaggcccatccattgaaaaccgcggtcaagcatccgttttcgtcatgattttcgttaacatattcgcgaactaattccgcatccttatccatctcgacttcatattgtgtaatgtaacccatcaaaccgcctcccctttgcgtactttttcgataaactctagcgccccggcgtactgcctttttgtagaatcaaagacgttcgaccgcttgactcgcgaaaccttatcgcgaatgtcttccagctcggccgctgtaagcgattgcgcaatagccgttttgtacccgttgaatgtccaaccgttaaggtcgacctccatcggcttgccgtcgtcaatcgaattctgaatttctacgaatctatcgagcagcacgtcgatgtcatcgcgtccgatttcaaggccgaacgcccggatgtccggcgacttttcgaattcgccttcttcgtactcccacgccttcttcgatgcgtttacgtagaggattacgtataagtcgacgccatacatctccgcataagcgacgcactgcttaacgtgcttttcatccggcttcttcagcgaatagaaagacgtacgggctgcgctcgtttgcttcgacttgatttcgaggcccacgcgcaatacttcgccgtcctcggtgacataacgcatgatgccgtcgcatgttccgaagaggtgaaacgtcttgccagcgcgctcgatcttatggttccgcttggcgaagtcctcgaacatcggcgtgccgtcttcgttgcgttcgaagctgaacgggcagggccgaccgactttcttttcgaaatgtttttccataaagagcagatcacgctggatcatatcgccgattgccgtcccaatgcgggtccaacgcccctgatacggaggctttcgcgttatgtctctcggatcgcctagcgccttatgataaagttcacgcgggcaggcattcgcagatgacggcgagaaatacggcttcttcggaaatactttcggagcatctgcgtaccatcggtgtatctgcgcgtccagtgcgttatcccccgtttccggaagcgagtgccattcgtttagatattcgatgagctcatccgcaatctgctgcgcatagccggccggctcgggcgccggcgctaattgggcgcgcagtgagtttgcggctgatcgtgcgtttgcgttcgtcaaactgccacccactctgttactacgacttcgcgtttttctacttcggtaatttcggccggatcgtcggctccgtaaatttcgctgtcatacgtccagtcagtccattcagatccggatctgccaatttctccgcgataatgtttatttccatcggtgaaaataacggttttactttggtacttgtgatcgtactcccatccgctttcctctacgactgtataggtcacatcgtcgatatcaattccgccctcaaacgccatatcttccagttgttcaatcgtcaatttaaccaattaaaccgcctccttatttttaaaccattcttctacgggcacgccttcgccccatttgcgcatgacttcgatatccgtaccgtttggcacaacgtctccccaacggtaagaattaagcatgatatcgcgaatttcttgcgcttctccccacgtaaaatcttccggaacttcgaaaatgagttcgtcatgtaccgttgaccacagcgcccagcccggtttgttagcgcaatattcgtgcgctttaatcatcgtgactttcgtttgaatagacgacgacccttgtacgcgagcatttgtcgcttgacgcaaagcgcgattaattcgtgaattatgtttccttgcgtcatcgtatttcggatcattccattttccgtacggaatgtttttgcgtgggagtttagcgtctggtagccggcgttttcgcgcattcagatcagcccaaacgtatccgttttttcgcacaaattcttcgttctcttttaaccacgccgacagcttcggcatacttccgaacaactcttccttaaactcggtcgcctcttttttacccacgcctaacatatccgcaagagaataatcactcattccgtacagtgtagctaaccatgcgaccttcattttctttcgctcttttgtgtcggaaccatcagcgttcttataaacttcctcgtacggtcgtttgtagaagttcgatgccatcgttgcgtatggatcgcgttcttctaaaaacgcattaatcagtactggttcgcccgacaggtgcgccacacaccggatttcctgcgctttaaaatcggcgcctactagcagctttccgggaggaggaccgaacatcggacgtgcttccggtggctgattctgcacgttaaacccttgctgcgttttatcctcttcgccctttccggagctgaatcggcccgtcacggttcccatcggattgaatcgcgaatgccaacgctcagttgttgggttttgctttgtcggcagcgtgtcgatatacgtaccactcaacttaacgatattcttgtactctaggagtttcgcaatgacatcgtagtcgtctttcaacggcttgagcgttttcttagcgtccatattcgggagctccttgccgattgcctttgaaagtgcgggccgcatctgatgagtcgagtttagatttatcggttcgtctccttcatggaatggcgtcaactccgcaactaattcctttcgcaactcctccgcacgcttatgcagcttttctccgtattctttcgcgaaatccaagtcaagaatatatccgttggcttctaaatcgacgattacatacaataacggaacttcaacggtttgataatattccaaaatcgtcgatattttcgccatgtgataacgctgaaattcgtacagcttccacgttaattcagtatccttcgctgcgtaaactagcgctagatctaacggtacttctttaaattgcgcattcctaccgaacaaagcatcgaaagtatctgccggtgtttttaaatatttaggtgctaagtctttgagcttgaacgaaccggctccgcctaatgtccgatcactctcgttttcgttcagaaggtgcatcgcggtcatcgtatcccaagcgacacctttcaaatcgaacccatgccgcctaagcatcgcaatatcgaatatcgcgttgtgtaaaaccttgccgaccgactcatcgttaaacacaggcgccagaccttcgagtacatattcgcgacttagttgctcgcaatcaacgtgctctaccggtatataaacgtgccagtcagcgtttggcaacgtcagtgaaagccctacgattacgtccgtataaacatctacgcctgtcgtctcggtatcaactgcgattattgtttcggtatttaaggcctcaattagcgctcggaaccgttcttcagtcgtaattaattcgtaattatccggcgtgttctcgaccatctgtcgcagggtttcttcgcgctgggattcttgcagcgtcttccataaccggagcgcctccgccttgctgaacgctttagggttaccggccttgttaacgcagtcagccggatcgcgcgccagcttgcccgcatccatggccgccttgacttccgttacccttttgcggtcggcatccgatagcttcatcgcgaatatcttgcgccagctttcctcgatcggctcggcggtcttggctttcgccttccgcttggccgtcgcctctactgcgtccgatttcgttgccgccggcttaagcgcgttcaagtttaaccgtaagccttccatccgtcgtcctccttcctcgcgaagtaattgcgggttacttttcgattgtatctgctacggtcaaaataccgaatgcaatgacagcgatagccgcgataagcaacattgtccaaggcgattcatctgcgccatgacccgctgagaatgcgattgatattccgagcgcatacgatagcgcgcgttcttttttccgattcataaatcgaccgcctccgtccatcttcgtttatagtccgcttcgttctccgcataccactccgaccagcaagacgtcccgcacgcataaacctcgaagagcgaatcgtaaattgcggatcgcccttcgtagaggttagcgttacgtgcggtgcagacggaggccggcttagcggtcaaagcgcgcctcgactggcgtaatgagttcgactttaagaaaatatccatgcactgtatccacgatggacccaccagatgcttgtttgaggacttcgataatatccccgtttgccacacgtccagcacactgattgtctactactctcgcgatatcacctttcttatactcgccaaccttgcgtccgatcttcgcccacttcgcttcttcgacttgctggcgttcgatctcggcgacttcctcttcggataaaatttcgagctgatccggcgctgcgaatccagaccctctaaaacagtcgccgccttcgattcgaatgagagtgactctccggtggttgtaggcgttatcggaaacctcgtaaatattaccgtccgtgaatccgctaagaggatagtctccgccgcctgaaagcaaccgcaccttatcgccttctttaaatttagcgcgtgctactgcgtctttagcttcggcaacttcttcgtcagtggcgcggacgagttcatcttcgtaaaaaattccggcttcgtttccgtttaatttttcgcaatggaaaggtgcgaaatctttgtcgtctctttttactagtacgatttcatcaatttccgcataatgagcgctttcgttcccgaccaccttcgcataatcaccgactttcaggcgttcagcttctgcggttacggcgcttactttgcggtagaatacgaagtcacggttactagcgtcatactcgtctccatcatcgtcagtgatccaaggatctctataactatcgaatcgaacaatttcgtaatattcctcatcggttaagtagtccggaggatcatcgaacttaacgtaatcgcccacattcgcctcatctgcgtcaatccgtacgtaccccgcttcacccttcaacgcagccacgtcggattttaacgattcgatctcgccttccgcctttgctacgcgttcttctacggacggattggtgctggcggcgacttttcggaaagcgataccgttaccattcttttggacggctgaagcgttccctctatacctcgttgggatttcgataccaccgctaggacgtttattcgccatgtaaaacgctccagtatcgccaccgattacgagatgtccttccgttaataggaatatgtcgccttcctgaacgggactatccgtcttcacatattccgcaccgccatactcaaccttcgtaatttcaccgttcaccatatcgagtgtcttaacgccttctaatttcgccaatcaaaccgcctccgcttcgttattaatatcttcgcgactgaacgccaaatccatccgtacccaacgcttgccttccttcgactgcggcccccaatattcggtcagctcgcgattctcgaacatccaaacggcgggcgccggacctgtgccgacctcgacgccgataaaataatcgacctcatcaagcgtataaggtgtgccgtcgttcttccgcgcctggacgatccgcttgccgccgcgcttttcacgtacgataatcgtcttcacctggaacgttttccactcgccgcttaacggacactttgcgctaatatcgaacgcttcttccgtttcggacgtactgaccgcctgccagccgctagccagcagcgcagcacgtgcgatcagttccgaatacttgccggtatcttctgctttatgcgccatataagcgcctccttttcgtttggttggtacgtgattagaacggtaattcttcgtcgctaggcttccaaggctcaggttcgttagagtctgccgagccgccgccctctaacggaggcaatacagatttcttaacaccgtctttcgcttcgtgtagcagcttaacaatgtcgctttcttcacgaaagtttgcgagctcttcgtacttgtaatcgataccgataaatgcttttgcttcttcgatgacttcgtcagggagatcgccggtttccaacgagtacgttttatctgcctgtttaaagtgaaccgcctgacctacgagtgtgtaatccggaaggatcttcttcgcaggtttctcggccttgtcatagtcgtcgattaaattgttcgcgtggaactcagcgatatcaattacgcgataggttttatatttcggatcgtagaccggaatcataaaaaacatcttacgctgcgctccggctttgcacgaaatgcattcatccttaccgggacggaaatactgctgtaattcttccgtacctactttatcgtgtggagagtgcaggcatgtgtgtttgcggaatttgtgatcataacctttccccgtgtattctttattttcgtgaacaaagtagatgtaccaatcgtcaggttgcgcgagaatgactaggctacgtccgtctttgttgatttctccatagcttccaacgcgaacatatcgcgtaacaccttccgggaattcactttcgccacttgacgctttatcccgttcctcttcacgtttctttaagatatctcgaatgctcattcgttttccccctacgtttttattaaggcttttcgccctcgcaaaatgccggtgtctgcgcccgaaacgccgccagcgcttggcagtagcgacgcgacacggattacctaacggccgccccgacattctccgaggacgcgacgcgcctatgatgcgtcgtcttcgccaatttgcgtccacatgccgaaaagtattaatccgataataacggcggcgatcggtcccacccacgaaagatcagacatacgccgcaactcctttcgccgcttttgtaagcctgcgttttaattcgaaggactcggcaggtaattcgtcaatacgcatctgaaccgcattgattcgcgcctggtacgccatcttcttcgcttttgatcgcgtccgtttaagctcggacttcagatgcgctatttcttcgttaagatccgcgatataattttcgttattttgaaccgcatcctctacgctttgtttcatcgtgtcgtacgcttcgttgataaatcggatcgccgtattcttttcgggaggatgaacggtcagtacataatcgctattcagcgcgaagagtataacgaccccttttccgccgtacatgcgcgcttccttgccgttagaatctacggtgattccgagatactttgcgtgctgaagctttttcgcaatccaattacgcgctacgtgtaaattcgtaatattgtaacgttccttcaggcgcttgcgtgcatggtgcgaaaacttgacctgaccggcggtaatcatccgacgcgcaccgccttaatcgatgtagccgggaaatagtcggccggatcttcgtcgtgcggccatgcgccttggtaaatgaaatcggttagtttgcgctcatctagcgcgattaacgtttggatttcgttaagattgggtaaatttgaagtagtcatagtacgttagcctccgttttaattgagattatcgtactaggtcgcggggatgcgttcgtaaagtgttcgcttgattccgttggcaacgaattgtattatagaggagtaacgaacgtcctcggacctagttacgtatagcgtgttatacagctagaaaagcgttaagttcgccgtgttgagaagcgtcgtaatttttcgctaaacctttgatcacacgttctacttttttgtagtgaacgcctaccttactgccgatcgaagcgtatgtaggtcgctcactcgaaagatgctcattaacgattgcagtcgttatggcatcggaatttactgttagggccttgataagttgcagcttatcttggtccgtttttatttctccatctaattgagaaatcaccttatcttctatatggacaacagcgccagattcgaatgttgcagcattctcttctgcggttgaatccattaatttatgtcgtttaacatatgttccattcttcccgcgaataatatctatagatgatttctttagttcgtagattatcgcgttttccgcgttttttattttttttgtatcgactgatgaagaccacttccaaagtttttcgtgtaaggcactaagtatgtcttcgcgaataacttgtctagttttagaaaaatcagataaaaccttagaaattaagtctcttgattcttcaaataggaggttgaagtcctcatcctgcctagttatttgataggcgttgattagctgtattaacttttcgtgtttcttcaactaaaatcccccctcatttattgatgcgtataaactttcctttttggacaccatttcataaaagaaataatattttctttcatgtccacatattagcatgtctaacattataattatctaaataggaacaatattttgatttagcaaacttgttcaggtatgtaaacaaaataaaaagcccacctaccgtgagatgggctttaaaacttatcctccgatcgcgttgattgctacttctttacctggatctgatacctggttactatacagcaaccctagagctaacacactcaccaatgttaaaacaactaataaagtcttcttcaaaaacaacatctccttttttcgatgaggttcccctcaagtttattgtcaggtttttgatgaaatcagtacattcgcctgcctccatcaaatcccttacaattatagatgcgtaatacaaattagaaccggacacgaaatcgcaaaactttttataaaggcttttccgatctcctgaaatcgcctcaaaatatccggtaaggtcagggtcgcccattttcccaacgcaatctagtgcatcttcataggaaacttttccttttctaaacccctcaacctttttcaaaacatcgggtgcactttcttcaactttctttgataagaggattctagcaaagttataattataaaccgcgtacccttctaatcgctcgttttttaattctttagctacttcaacactgtcttttaagtagctcaaacaaattgattcatctgtttgcaggtaagtcatgccaatgatgtacaaagcgtctgaattcactctcttgttaatattagcattgaggagaatatttgagtagcgtctagcttcttctaagttgtttgaaaaaaggtgtgcatatgctaaaatctcagatagcctgtacaaataacactcttttaaaaacagatgagatttatcattcaatccatttatttgaacttcgagttctgaagctttgtttattacatatgagaactgtcttttatgtagtaaagtgatgcaaccgtagatgtctacaagaattttaaggatcgggtcgttgaggtttgatagtttgtctagttcttcgtccattgaatcgaacttaacttttccgtgcatgtacttactgataaaagaatacaccttaacgtacttctcgataatattccgcttttcgcatttataagtctcgatatggtcatccagaagctcgatatctctagttatagcagcatactcaaaagtctttcttatacaatcggagctctcggttaattgagggcatacgtctctcataaaggatctataattttcaggatctgctaattgcgaaaggacaagaaggcttcttaatgtcagtttccgctttccagctctaaggtttcctacctgttttgtagacagttttaaatatgacgcgattaatgagtcatttaaatcatctctgtccgaaatacgatcaaatagaaagtttctaactttgtccatgttgttcaccccagttttaagtaaatgaatgacatttccaccacgttcaagtataattgaattatatctcatatgtttatatacgtaaacatattattgggaggatttttaaaaaaatgatcgatttttcccctttgatggagactttaaaagaaaaagaaatgaatctgagtgatttacgtcaggttatgagttcagctactcaagctaaaataaagaaaaatcataaagtgtctgattctaaaatgcgtttaggaactattgaaaaaatatgtttattattagacgttcccgtggaaagagtcattaggattgccaaggaataaatattggtaaatgttctttatataagttaaaatgttacggacacctttacgaatggaggtgtttattacgtttaaggtcggcaaatgccggatacccgaattatgcaaagatatcggaattgaacacgcacaactcgcagccaaggtcggactagataaatcgcgtatttccgattacgccagtcttcgcaatataccgaatatcgagctcgcctataatatcgctcgtgcactcggctgtagactcgaagacttatacgagtgggtagaggtatccggcgacgaaacggagggctagaacctccggccgacctgaagttcggaaattcccgaaccgactcgtaatacagtacgtacaccctccgcacgatcataaacgtttctcaacgcctctgcaccgcgctttaccaatagttcattagcgtctttcacctccgttatataaccgtgcgcaagccgcacctttccgtttaaataacgctcgatcgccgcacgtaatttatcgccagctttgtcgttatctgtaactaccgttaaatattcgataggagactgcgcaattatgtccgccttctgtaaattaaatgtgctgccgcctgttccgatcgccggtacgcccgcagaccgccacgccatagcgtcgatctctgcctcgcatatcaccgcgcttttaatccgctgcgcatatacgagatccattccgtaaactaaataccggataggcaagccgccttttacgtaccagaacgccttccccttcgttgccctatacttaacgtttgccagccggccgttaggaagccgccaagggatcgcgactgcgttaccggcaagtgatacgccagcctcttcttgtactgcggccgcaatgccccggcccgttagataagcgttaggccccggcgttgtgtcagcgaggaccgattccgctaaaggctccggcttcgtgacggcttttaatttcgggagccgcagcgccatacgtccgccttcagtcgccggtgcatacgtttccaataagtaatcgattgcgtcgtcttcggtttcgccgcgcaggaaagcgagcagtttaacgaacccaccccgcgcaaactcttcgtcataggcgcctgagtcgccccaatagccggcttttgccgacgctgtgtcttcgagatatacgtaaaagctcggagtccgatcgtatctgaatggactggcggccagcaggcgttcgtcgccccacgtcggccgggtccagtcgaattgttcgagttcataccgaatgtcgacgtctacagaacgtccacccaaatttaatatcggcaattcgagacacttcctttcgagacttgtaaattatattacgacattgttacgaaaattacagtcgcaatttgtcgaaactattcaaaaatttagatgtaattgttgacaatatcatccggtaaattccaaacgatctaaaactcgaacacgtccgcagccccggcgcccatttccggctgttttactacgccgatttgcggcaaatagatgatctctgcgacttccccttcgccgccgtcgcgccctttgttcaatccgatcaagccgcggccttctttcgcgttcgtatcaactgcgatcaataacgcagcatcttcgagcagggctttcgttttcttgacgtccttacgctgcggcagcttaagctcgcgcgctccgtcttccgtttctttctcgtcatcctcatctgcctgtgtgagcgcaaagatcgtcgttttcgtatgcccggccagacggcgcagtttttgcgaagtattagccgcgtctccgcctgccgtctttgacgtattggcttcgtagtcgaggtaataaaacggatctacaagcacgacgtcggctttcgtttcgataatgtccgattttagatcgcgcagggttcttgagccgaagtcttcgtcgtcgacagctcgcaccgtaatgtttcccggaatgatttcgttaagacgatcaaggaattccataaaacccgcctcgaactcgtcggatagtttgccctgacgtacgtcgcgagaattgaagccggcttccatattgacgccgttaagaatcgcagtcgtaactcccaggcttccggaaattgaaacgtataggcgcactaggacctcgtaccatcccatctccatcgaccatatcagaacgttcgcgccctgcatcgcacagttaacgacttcctccaacgcaatggccgatttaccacgccccgactttccgtaaataacgtagacgttagatgatacatagccgcccatagcccggttaataaagtcgaacttgctgcgccagatccggaaagactcgccggccttacggttttcatattccgctttaaacttgtcgatgtcccgtttgatatccgtcccgaccgaatttcgaacgtttgttctcattttaagactttcggcctgccccgtcaaccactcgaagaattttcccatatcaccgcttttttgcgcttcaataaatcgtttttcgagctgcggctcctgaacttggcgattggtttccggatcaatacggccgttcatcagctcgataaattcgcgctcggctgcccgatcctttaggtttttcgcaaggtaatcgtagctggcttcgatgttaaaatccggctggaagtccggcacctcattcgcaaccatctcggccgtcggcgcttggcctcggtgttgctcggcgtattgcatgacataccggaaggcttttcgttcgccttgcgttggtaggtcgttttcagcgatattaaaacgcaatagagcgttcgggtcgttcgcttcgatggctttcgatattagtaaagttccgtatttcattcgcccgcctcccgtcttaatttcgtcatcacaccgtcagccttcgttttatattccgcgtctccaaacgtttcgtaaaggcgcatgtaatcgttatattcgtctagcagtccgtcggttttcttcgcatcttccttcgctttctttttcgtcatctcactcgacaccttttcaagtccttttcctaaccccgcgacactttctatgcttggcaatttcggaaaatagtccgtaaagtgaaacgccgtgtttgtcggctccggatagttcgtcatgtcatacgtcatcaagaaatcttccgacgccgcctcccgacagaccaaacgcaggtcatcgctattggcttccagccattcaccgttaatcgcgtcggtcaagtcgtactcaacgtaatcaaaagcgccgtattcttcgtgctgtgtgacttcgcgccagcaatcaacgtagaaaatccgatctttgtatccgtctactgcgacaatatctccgattgcgaatttcggcttcattcgcacatctcccaacgtaatctatctaaaacaatgtcgtcgacctcttctccggattctgtctctccggtaggagtatatcttgatttatatacctcaccattctcgatcgcttcaccgaagtcgtggagtgttttaattggacgcgaataaacaatcagtctgtcaggaggagccggataggtgtgggtcggataaacaaatacctgacgtgaattcttatacgaaatgtactcgcacccattcgctccaaaccaaaatatatttaaatcaacattgtactctccaattatccctttactcatctacgtatcccccttttcgattcacctacgaattcaatctcgcgacagagatcgccaatacggtcggccagccgcttttctccgaacacggtcgccagcgatccaagcgcaacgttactcgtatagatggtcggtagctgattcgttactcttgcgttgattacagcgtgcaaatcgccgcgaaatccgtccgttgcatcacgcacccctatatcgtccaaaaccgcaaacggcgccgtcttagccgcttctaatgcgcgataataacgggcggccgccggctctgcaacggaatccggaacacgtggacggttgaattcgttatagtcgttctgccacgcgttcacatcgaggaaatacgccggcctctgcaacggatcgaggccacgccgcagggagccgctataatggacgcgcagccattcgttaagaagtgcggcggccgtcgtcgtctttccggtgcccggcgattcgcttacgaggtacagcgacttaatgcggtcggtcggcgcaaccggtccgctctgttcgaactgccgcgcaaaggatgccgcataagcctcggccgccttataagcttcggattggtcaccgcgcactggcgaattcttcagcgtgacgagccgatactccctcggaaggcctgccgcccctgatcgccctccttcgcctgatgcgccgtgcatcgcgataaaatgcgtacagtgccgcgtacatgcgtcggtcccggccgctttacatccgtcagcgagtacgcaagtattttcgttagtcatattcgcggacctccttccgatcaattcgttttcttatcgttctctcatgcttcgagcgcatccgcttatctgcaccctttacccggggttccggatacattgcgtcgtaagtccaatcgtacccgctatactttttaaacaccgttgttttcaagcgtctatggtacgtcactcacgcgcctcctttcgttaattctttcgcagggtaaactccgctctaaccttctgatcccacgagttacatatgaattttccgccagtagccgtgtaaccctttcgatttaaccactcgaccatagcttcgactatttccgcctgactcatcgtatattttacgttcattcgcacacctcttcgcgtgagtcatcgataatcgttaggtcagcgttatctataaaatcgtaacctccgccgacatatcggtatttaccatccgcaatttctctaatctttgcttcgtaactgtcatcgccgagttcgccttcacggcataactggtagtagtaatccgcgtacttgccgcgaacaacgtcgcccacacgaacctcagtcggctgcggggcgttcaagtattcgtctggcaccttcaatcccaacgcacgtcttagcgcaatcgcctttccgatgtgaacgttgaagcagtcgtccggcacggccctggcaataccacgaacatatacgagctcagttccagctcccttcaataaaactactactgtacgtttatctcgattaacaatgaattccgatttaacacagaacatttcaagtcggtaatcaaaaggcttaccaccgtgtgttctcccatatttcttcagggtttcaacgtccgccttcgcctgctcaacaatttcatcacggcagacttgggcgcttttctctggctgccataaacgttcctctagtgttgtacaaaccggagtcgttaccgtattctcatctccagatataacaacaacgtcttgattcgtttttgcatattgaactacgaatctataagaatatactccgccaataacgatatctccaaaacgagatttataaccgaaatatttatcgtccttcttttcaaatagcgtattcgcattattgattaccgtttgatttacgttttccattccgtcagcctcctcgtttttaacttcgctattgacgatgctttcgttcaagcgactttattattatatcttatcaatctcttgaagtcaacaactttttaaaatttcttttttcgtcagcgccttgtttagcggcaacgaataataatataccacctcacaaataatagtgcaatagttttttaaaaagaaaatcaaaaaagttttacaaacgacttgtttctaaaaaagcgccgtactgcgatatgcagaaacggcgctttcacttttattagcgatgtctcatttgagggaataataaaacgtctctgatagacggagcatttgttaacagcatgacgaggcggtcgatgccgatacccaatcctccggtcggcggcatgccgtattcaagagcttcaacgaagtcttcatccatcatatgcgcttcatcgtttccttcttctctttctttcaattgcgcttcaaagcgttctctctgatcgatagggtcattcagctccgtaaacgcgttagcgtgctcacggccgacgataaacagctcgaaacggtctgtaaaacgagggtcctcaggatttttcttagcgagaggagaaatctctacaggatgtccgtaaataaatgtcggctgaatgagtgtttcttcaattttttgttcgaagaattcattgatgatatggcccactgtcattgagtttgtgatctcgatgccatgttcttttgcatggcttcgcgcttcttcaacagtcatctcattccagaaatctacgcctgtcgcttctttgacggcatctaccatatggagtcgtttccattcaggtttcagatcaatctgctcttcgccgtactggattgtggtgcttcccagcacttcctgcgcaatatgtgcaacgaggttttccgtcaggctcataatatccttataatcggcgtacgcttcatacagctcaatcatcgtgaattcaggattgtggcgtgtagaaacaccttcattacggaacacgcggccgatttcgtagactttttctaatccgccgacgataaggcgtttcagatgcagctcaatcgcaatacgcatataaagaggcatatcgagcgcattatgatgcgtgatgaacgggcgtgcagacgctcctcccggtatgctgtgcatcgtaggtgtttcaacttctaagtatccatggtcatctaagtatcttctcatcgcttggatgattttgctgcgtgtgataaacgtttgtttgctgtcaggatttacgatgagatcaaggtagcgctgacggtaacgctgttctacatcttttaatccatgatatttatcaggaagaggacgcagtgcttttgtcagcagttcaaaagatgtcgctttgacagacagctcgcctacgtttgttttgaaaactttcccggtgatgccgataacgtctccgaggtctgaagatttaaagatttcatattgttcttcgccgacactgtcttttcttacgtagatttgaatttggccctctaagtcctgcaggtgcgcaaagccggcttttccttttccgcgctttgtcatcatacggcctgcaatggtaacttcgatcgctttttcttcaagttcttctttagaaagctcctgataggcgtcaatgatctgctgagattgatgtgttctctcgaaacgttcgccgaaaggatcaatgccgttttctctcagctggttcattttatcgcgtctgacttgcagctggtcgttcaattcctcatgattttgctcttcttgactcattggtatcactccgttacattttgatttcatgaaaaagcagaaaaactgccagcggtaagctggcagtgagcagcaatagagggtgtatattaacctacttttgcatcttgaagctcttttgcctctacttcagccgtaaatgcatctaaaagctgcacaaactcttcacgcgcctcacaatggttgattccgttgcggacctccgcattgcctctgacgcctttcagataccaggcagcgtgttttctcatttctctgactgccactttttcgccttttaacttaatcaggcggtctaagtgcagcttacatactgacattttttcacggactttcggttcgtcttttaactcaccggtttcaaggtactgaaccgtacggtagatcatccacgggttgccgagtgcggcacggccgatcatgacaccgtcaacaccggtttcctcgagcatgcgtttcgcgtcctgaggcgttttgacatcgccgtttccgatgacaggaatagagagggattgttttacttctttaatgatatcccagttcgcagtgccttcatacatttgcactcttgtgcggccgtgcagcgcaacggcttttccgccggcgcgttcaacagcctgggcgtttttcacggcataaatgtgatcttcatcccaacccattcgcattttcactgtgacgggtttatcaacagcatctactactgcggataccatttcataaattttgttcggatcgagaagccattttgcccccgcatcgcattttgtaatcttcggcacaggacatcccatgttaatatcaataatatcagctgtcgtattttgatcgacaaacttagccgcttctacaagggtttctttctctcctccgaaaatctgaaggctgagaggtttttctctctcctcgatgaagagcattcccattgttttcgcgttgttgtacagaatggctttgtcactgaccatttccgcacatacgagtcccgctccgaattctttaacagtaagacggaatgcggcattgcagactccggccatcggagcaagaactactctgtttttcaattcaatatcaccgattttaaacattaatcgacctcctttcgtgcattttgaggcggagccaattcctccgcgcttatatttaaagcatcagcagcatcacgaatgatcacagctgacggcaaacggtttccgcgttcaatctcgccgagaatggaaactgatatacctatcgcttttgcaaacccttcttgagtataccccttcagctttctgaatgcacgaattcgtctaccccagatttctgcttccatactcttacaccttcttggtttgtttcagcgcttatggtgatatgatccgcctgaggacaaatttcttttaacggcgcaaggacaaataagcgctcatacattctcggatgcggaacaatcagccgctctgtttcaatattttcacgattatacagcaaaatgtcaaggtctgccgttcgcggcccccagcggatctccctcgttcttcctaattcagcttcaatgctctgcgtcacatcaagaaggtcaaaaggtgataatgccgttttcacttcaaccgccatattgagaaactgatcctgatcctcatagccgacgggatccgtttcatatatggaggacacttttgacaccgtcacgccatcctgccggctgagcatggccactgcctggcgcaaatagtgttcacgatcgcccatattggagccgaggccgatatatgccgtgttgttcatgatttctttctcgtcatttctatggctactgatttataatggccgggaatcggcggatcaggcttaataacctttaccgtacattgctgcacaggctcaaatttcttaagaaccgtgtctgcgatccgttccgcaagcgtctcgaccaaattgacgggctcgccctcaacgatgccgcggcagacactgtaaagctccgcataattaatggtataagaaaggtcatccgtttgtcccgctttgctcaaatccagctcggcagtcaggtctactttgaaacgctgaccgagtttattttcttcttcgaacacgccgtgatatccgtaaaactccataccttctacatatactttatccatgatgtgcgcctcctttattcaacatagcatccatcatcttagtcattctcgcgatctgcttgacatcgtgcaccctcacaatgtcgcagcctttctggacgccaaggcataccgtcgctcccgtcccctcggcacgttcttcaggaggaaggtcaagcacacggccgatgaatctttttctcgatgtcgcgaggagcagcggataccctaacccgctgaacacttccagcttgttcatgacagccagattgtcctcatagcttttcgcgaagccgatccccggatccagaatcatgttttcatctgaaacgccggcttctgcggcaatttttacactttccatcaaatctgcgagcatatcaggaatcagatcgttatagtttctctccttgcgattatgcattaagataatcggaacactgtgtgcggcggctactgacgccatgtcaggatcacctttcgccccccagatgtcattaatgatggaggcccccgctttgaccgcttcgtctgctacggacgctttgtacgtatcaattgaaatcggaacgtccagttcgcttgtgatccgctctatggcggggattacacgtgacatttcctcatcagccgacacgagtgatgcgccgggccttgtcgattctccgccgatatctatgatgtgcgccccttcttcagccatcttcgccgcatggagaagcgctctttccgtactgtcgtatttaccgccgtcagagaaggagtctggcgttacatttaatatccccataatgagtgtcttctctttataggacagagcgcctttttttgtatgaatcagtttaggctgttcaattgtttgctgcgccattttgttcctcctcctatacattcattttgtttatttcccgctgatactgcgtccggagcaattgcaccgttttaccatccgctccgggaagcggcacttcctctattttagaaaacgggatgatttcaaggacggagtttgtcatccacgcttcatccgcttcaagcattgattgaaaacggaatcggccttcaatgacttctgtcccctgccgtttcaattcatcaatgacaaactgcctcgttacaccgtcgagaatgcctgtatccaaggatggcgtgaagaccttgtctccttttcgccaaaacacattggagacaatgccttccgcgacatctccttctttggtcaggaaaatcccttcaagattcggatcattgccgatttcctgtttagcgtacatgttgtttaaatagtgatgggattttaaccgaaaagatccttcaggcgtatttctccggacagagagaagcttgccttctttttgaacaggcagggcttccggattgagccggttgacgaaacaaaggacagtcggcttttcataagtctgggcagtaaatcccttatcgctgacgccggcggagacgttaagccggacacgcgcgctgccgtcctctatgtcattgaggagcaagaggctgtcaagcatatcaagcagctcctgtttgttcacctcatatgcaatctgcagatcccggagcgccctgttgagcctggcgacatgcgcatccggcagaaacggccggccgctgtaaagcctgaacgtctcgaacgcgccgatcccgtacagataaccatggtcaaaaggagaaagcgccgcttctttctcctctatatattgaccattcaaatatataatcacaccgtcacttccttcttgcggtgtgtctctataaagtttctgagcatctctttgccgaaggaggtcatgatggattccggatggaactgaacaccttcaatgggcagctcattatgacggattgccataatttctccttccttggtttgagcggataccgtaaagcagtccggcaatgtatccgctttgacaataagcgagtggtaccgagtggcgaccagcggattttgcaggccattaaaaattgtctgcccgtcatgcataatctctgacgttttgccgtgcatgagccgctccgctctgacgacatcgccgccgaatacttgtgcgatcgactgatgtccgagacatacgccgaaaataggaatgctgccggcaaaatgtttgatcgcttcgaggctgatccccgcttcatccggactgcacggcccaggtgaaatcatcaagaaatccggcgccagctcttctatctcttcaatcgtaatcccgtcattccgtctgacgatcagttcctcccccagctcacccaaatattgaaccaagttgtacgtaaatgaatcataattgtcaatcattaatatcatctctgctcacctcatctaattttttgtctcttcttcgctcagctctaatgcctttttcatcgcaaaagcttttttgaacgattccttgtattcatgcttcggaaccgagtcaatgaccactcctgcgccggactgcataaaagcatgtcctccggctgcatagatcgtccggattacaatgttaaactgcaaatctccgttaaatccaaaccagcctatagatccagtataaagccctcgtcttgtcggctcaagctcttctataatttccatcgttctcactttgggcgctcccgtgatggtgccgcccggaaaaaccgcatgaataatatctgtcgcgtcatatccgtcctgcagttctccctgtacatttgacacgatatgcatgacgtgggagtacttttcgatcgccataaactcgttcacccgcacggagccgtagcgcgatacgcgcccgagatcattgcgctcaagatcaacaagcatgacgtgttccgcacgttctttttcattgtgaattaattcatcagcaagcgccttgtcttcagcatcgtcttttcctcttgaacgcgtacccgcgatcggtctcgtttcaagcttcttccccttttttgttaccaatagctccggcgacccgcatatcacttgaaaacccggcgtctccagataggccatgtaaggagacggattaacgtttctcaaatgtttatacacttcatacggatgaacggataaggactgggattgcctgatggacaaattaacctgaaacacatcaccgctcgcaatatattgtttaatttgttctacagcctgtgaaaatccttcttcagtgaacggagcggcatacgatccgtctccgtcccggttcagcggtgaataaggctcgtcctccgtttggagggaacaccacatatcctctaagccggacagcttctcttccgcaagctccgcttcttccgattcggtatgagtaatgagccataacgcctcttcctcatggtcataaacggccacatcgtcaaaaacgagaaagtaaatatcaggtgtttccaaatcatctaaagacagcatcttaaaattctcaatatatcgggcgtagtcgtaactgataaagccaattgcgccgccttggaagtccgggaactcatcgtttgtttccgtcccaagcgcctcaaaccactcatgaaaggcccgcagcgggtcaccttctttaaacagcgtttccccttcatgcttgattgtcgtaattccgtctttccccttgacggacgcaatcggatctagaccggctatactgaatcttccccctctcgcgctttcgagcagaacatgccgttttctcgatttcgaaaggttttcatactgctgtaaaaatgcttgtttcgtaaaaggtattcttcttcctgccggtctgcgttgtgccatcttatcaatcctctgcttcgtttttctctagttttattttatagcaatcacactggtgaaaaaagtgaatttctcttccaacgatagaattcgaaacgttttttggattttcgatgcttcaggcacaaaaaaactcccggatacagccgggagccgtgtgtatgtctctattcaaactgatatagcggtgtgcttaagtaacgctctccgttactagggatgatcgcaagcactttcttgccttttcccagttttttcgcgatttccagcgccgcgtaaatggctgctccggaagaaataccgccgagaatcccttcttcttttgccgttttacgggcatattcaaatgcgtcctcgtttttaacgggaatgatctgatcataaatgtccgtgttcaatgtttcagggacaaaacccgcaccgataccctgaattttatgcggacccggttttccgccagaaagaactggagagtccgccggctctaccgcataaattttgatggatggatatgcttctttcagcacttcacccgctcccgtgatggttccgcccgtaccgataccggccacgaacgcgtcaagctggtcttctccaaactgttctacgatttctttccccgttgtttgacggtgaatttccgggtttgccgcattgttgaattgctgaggcacaaaatagccgtgttcctccgcaagttcttccgcctttttaatggcgcccttcattccttctgcgccgggagtcagtacaagctccgccccgtatgcgcgcagcagattgcgtcgctccatactcatcgtatcaggcataacgaggatcgctctgaggccttttgccgcagccaccatcgcaagaccgattcctgtatttccgcttgtcggttcaatgattgtgtcgccggcttttaatttcccttctttttcagccgcttcaatcatcgccactccgatacggtcttttacgctgctgcccggattcatgtattcaagcttcagatatacatctgcgctgttttcatccgtcaggcgattcaatttcacaataggagtattaccgattagttcagtaatagaatttgcaatacgaaccatattggacacctcaatttccgactaaatttattggtattataaatacaagttatcaatttcaaaattttttgtcaatcatttagttcttttttccccgtagaaccaagagacccccgcctctttccacagcgttttgaccgtcgccttatcacctaattgatccatcgcgatctggcgtctgatttggctcttcacttcattgtatgagaaagttctcgctttaagcttttctttcagctgaatgaccgcatatcctgaagaaactttaatcggttcagccgaccattcattttctttaaggtttttggcttctgtgatatatgccggcgggatattctcctggttttctgtcacaaagccgaggtctccgccatactgagacgtgtatctgtctgtggaacgctctgcggcgacggcttcaaagctggaaccgcctttcaaatcagccagaaccctgtccgcttcttctttgcttttaacgacgatatgccggattctgtaggaatcatcgaattgatacagttctttatttttattataaaatgattgcatttccttatccgaaatatcgatatccttcgtcagcagttcttcaagaagaatgttgtagcggatctggtctttccattctttttccgtaatatgactgtcttcataaaatgaattattcacagctttgattaaaagaaattctctctccagttcgctgtttgacactgtgagtttattctttttcgcaagttcttccactacttgtgtattaatcatgtcttccagagttgattttccgtactcatcttccatctttttcatccagtcttgcctcgtgatatgtttatcaccgattgtcgcgatggattcttcagatgatcccgcggcttgggattttgttaacttatacgcgactgccacgctgcatactaacagcgccgctacaataattgtcaaaagtgttctcggtttcaaaatctaccccatccctttaataaaatagaacaacccgctaaagagctagcgggttgtttcgtcacgaagctcttccagttcttcttttgtaaataaatatttctcattacaaaaatggcaaaccgcttcggcttttccgtcttcttctatcatatcttgtatttcttttttgcctagtcctaaaatagccgcttcgaatcggtcttttgaacaagaacagtgaaatttgaccggcatggtctcgagtacgtccggtttttgacccagtacttcttctaagatttcttccggtgtcaggcctttttgaattaatttagaaatcggttcgatttgagataattgcttttcgattgttgaaatggtttcttcatcggttcccgggagaagctggataatgaagccgcccgcagcgagaattgtgttatcagggtttacaagcacacctacaccgacggatgaagggacttgttcagaagaaactaggtagtatgtgaagtcgtcaccgagttcgcctgagacaatctctacttgtcccgtaaaatagtcacgcaagcccagatcttttacaacactaagggttccgtccgttcctaccgcccgtctgacatccagtttcccctgttcattgaggtcaaaatgaacgtgcggatttgatacgtaggctctgacttcaccctttgcgttcgcatctgcgacaatggcaccgatcgggccgccgccttctatcttgacggtcagcttatcttcacccttcagcatcgctccgaggatcagagaagctgtcatcgtccggccgattgcggctgatgccgtcggccatgtgtcatgccttctttgcgcttcatttaccatatctgtcgttctggctgcataagcccgtactttaccgtcatatgcaattgctttaattaaataatccatcgtttacctcctatacgtgacccacgcgatttcgctcataaatgatttcaagccctttcagagtgagaaacgggtcaacaatatcaatacagtctgattcgttcgcgatcaatgatgcaagtccgcctgtcgcaatgactttcggttcttgtttggcctgccatttcatccgcttcactatgccttcaacttgtccgacatagccgaaaaggatgccggactgcatggcgcttaccgtgtttttgccgatgatattatccggacgggcaatttcaattctcggaagcttggccgcacgggagtagagcgcttccgttgaaatcgtaatgccgggagcaatcgcgccgcccatatattgcttgttttcatcaatgtagcaatacgtcgtcgccgttccgaagtcaacgacaattaatgggccgccatactgctgaattgccgcaacggcgttgacgatcctgtctgcccccacttctttcggattgtcatattttatatttaaacctgttttcatccccgggccgacaacctgcggctcgatgtgaaagtattttgtgcacattctttctaaagagaacatgatcggcggcacaacggatgagatgataatcccttcaatttgttcaaacatgagtccggaatgttcaaataaggagcggagcagcatgccgaattcatcttccgttttgtgtctgctcgtttctatacgccaatgatattctaattccccatcatgatatacaccaatcacggtgttggtgttccccacatctataaccagtaacaacctctatcaccacttttgaatagtttctaatcataacattttcaacattctacaataccatacacgatctgcggctcttttgtaaacaaaacggaaccagtaaaaaaaccgccggtatatgccggcggttttcatatcagaatgcgaactattctttcggttcgtccttcttttcgtcttctgttttagacagaatgtttactttcacatcgtctttttgaagatggtcatctgagaaattgcgctctgggagttttccgtgatccacaagatgcttgatttgttccgcatctaatgtttccacatcaagcaatgtctgagcaatcaattcaagcttatcgcgattttcagtcaggattgttttcgcacgctcataacattctttaatgatgcgttgaatttcctgatcgatttcgtaagcgatctgatcactgtagttttgctcgttgttgaaatcccggcccaggaatacttgaccgccttgagattgaccgaactgaagcggtccgagtttttctgacataccgaactctgtcaccattcttctggcaatgttcgttgcccgctggaagtcattgtgagcccccgtgctgacttcgccgaagataatttcctcggcaacgcgtccgcccagaagaccgacaattttatcgagaagttcaggttttgtctggaagtaacggtcttctctcggaagcatgactgcgtatccgcctgcctgccccctcggaacgatcgttactttatgaaccatatcggcttcatccagcacaagtccgataacggtgtgaccgccttcgtggtacgccacgatattgcgttcttttttcgaaatgacgcggcttttcttcgcagggcccgcaatgacacggtccgttgcttcatcaatgtcgcgcatgtcaattttcttcttgttttgacgggcagcaacgagtgccgcttcgttaagaaggttttctaaatcggcgcctgagaaaccaggtgttcttgaagcaattgcttttaagttcaccgtctcatcaagcggtttgtttctcgcatggaccttcaatacggcttcacggccgatgacatccggacggtctaccgtaatctgacggtcaaaacgtcctggacggagcaatgcagggtccagaatgtccgcacggtttgtcgcagcgataataatgattccttcattcgcactgaaaccgtccatctctacaagcagctggttcagcgtctgttcgcgttcatcatgcccgccgccaagaccggcgccgcgctgacgtcccacagcgtcaatctcatcaataaagatcaggcagggcgcgttctttttcgcattttcgaataaatcacgaacacgggaagcaccgacaccgacaaacatttcaacgaagtcagatccgctgatgctgaagaaaggaacgcccgcttcaccggctgatgctctcgcaagcaatgtcttaccggttcccggaggtccgaccaacagtacgcctttaggaattctcgcgccaagctcggcaaatttgcgaggatctttcagaaactcaacaacctcaacaagctcctgcttctcctcatccgcgccggctacatctttaaacttcacgcgtttcttttcttccgtatacagcttcgctttgctctttccgaagttcatgacacggcttccgccgccctgagcctgattgagcaggaagaaaaacagaataaagatgatgacaaacggaatgatcgtcgttaagaacgtcacccacccgcttgtttcctgtgcgggatcaacttttacgtccgtctttttaattgcgtcaaatatctggtctgctccttttccttcaggaacatgtgttaaaaagtactggtctttgtcatattttttcagctgtccttttacctcataaacacctctgacaggctgaaccgatacgctgtcaactttcccttcatcgagattcttgataaacgtactgtacgacatattttctgttttcgggtttgaagtctggaagtaactcacaaccccgattactactaataaaataagtaaataaaaaatggtattacggaagacccgattcattccttacctcctcccacagtaagcacaactatgttcaatagtaccatagaaaatcattccaatacaaccgataaccatctcggaagcaggcagccgatcagctttcataaatcgccggttttaacactccgatgtaaggcagattgcgatagcgttcggcataatcaagtccgtaacccacaacaaacgcgtcaggaacttcaaagcctacgaagtctgctttaatgtccgcttttcttccgcttggtttatccaacagggtaacaatcttaattgatttcgctttacgatatcggaagagttctacgagatagctcaaggttaacccactgtcgataatatcttcaatgattaagatgtcccggccttctacagatgtatccaaatctttgatgattttgacttctccggaagaaaccgtggaatttccgtagcttgatacatccatgaagtccatttccaaatatgtatcaatatgctttataagatcagccataaaaggaagcgctccctttaatacaccgattgccaacggaaacgtgtcgctgtactcgcttgttaattgttctccaagctgttttactttctgctggatctcttcttctgaaatcagcactttttcgatatcttgtttcatgttaatgcttgccccctacacttttcatgctgtctatattgtaatacaatgcggtcactgtttggaatcacaagatcgtcaaagatggattttttcaagccaggcagccagataatttcaccgcttgcatccgttacaatcggccatacgtcccgatcacgcagaggcagtttatgatcaataaatatatcttttacctttttcgagccattcatccctttaagtttgatccggtcaccgatttttctcgtccggattgttaaaggaaattgcaccttatttctgcttgtcataaaaacagcattcccatttgtgatatgagggtcagcctgatcggccacctctatcataaagccgttgggcagaacagcagtctcgccttccgctccttgcagctgcagctcaaagggaaccttttcacattgccattgttcaaatgtaaacaaacatgtctgatatgatttgaccaccttcagccctttcggaaaatcaagcaccccagaagcgcttccgttttctgcccattcaagaaactgctgtatgtggcgggcggaaaacgacgatggaacgttttcataaagatagtttaatattagttgaactcctcttctttgtaaaggtatcggaagggcaagcaattgagaggagctgacttcaactgatgtgtcagacttgcttgtaataaccttattcattcgttctttcgttaatgactgcaagtattgttcgtcttctgtcagtgcttcactcactttttgaaacattttatgaacgtcaggtgattcttgttttaaaaaaggaagcacggtctttctgaatctgtttcttgtataatcgtcctttgtattgctctcatccgttctgtaggacagtctttcttgacggcagtattcaaggatttcatcctttgccgcatagaggaaaggcctgatcagcaaaccggaagcaaattcgcggacgggctgcattcccgcaagccctgccccgagcgtgcctttcgcaagcctcatgagcatggtctcaacttgatcatctccatgatgagccaacgctaaaaacttcgcttggtgctttgccatcagatctttgaaaaactgatatctgcaatcacgcgcggcagcctgcttgttcagcttattcttctttgcgtatgcagaaacatcaatctggaccgtttcgcagagaatgtgttccgcctcgcagtatgactgcacaaacttcatatcttcttcagattcagatcctctgaactgatggtcgacatgcgccgctatgataacggaggacttcccgaagtgcttattcagcatactgagaagcgccattgaatctgggcctccggagaccccggcaataatcgtttccccctccgcctgaagatgatatgttttgaaaaaatcttccacgcttttcacaatgtccccctcacgatgagcaggttttttaaagatatacatatcctatcactttcattccctccaagcaaagaagaagcatgagctcaggcgtccggccggcattagatgagaaaaaagacgatgtaagcgaaataaagggcgagaacgctgattaaaatgagtgttgtttcaaataaaccattgttttttgcgggtttttgtttaggtttataccgggtctgagaaacagtgccctgccgcggttttgcttgcggcggcttaggctttgcggcatccttccttttgctcccgatacactgccccgccgtcaggatatcatgcttcatggcttccgccgaaggatattggccgtttaaagcagaaaacagaaccttcttatacttattcaaaaacggatggccttcaatgatggaccgaagctgctctttcggcttgcctgtcttcttgcactctttcttctgaacacagtggatcatgatcatcgctacagcaaacaagtcataggatggttctgcttttcttgttccatacccccaatagcccctgtcgtaaaactccgtatactctttaattgcgcggccctgttttgtcgttccccctacatcaatgcagcgaatggcagccggaggtccggttacaatgaggttttccggcttgaggtcgccaaagacccatccttgctgatgaaggactgacagactggaaagaagctgaaccatcagcaccggaatccactctgttcccttactgctgatatattgcggaagaagcggcccttctatgtactccatcacgtaaaaagatacatttttattcagctgcggaataaacgcatcgtccgcatcaaaaaaagaaggccccatcgtttgcgaccgggcctttgaaaaggatttcaagacattcacttcagaggtaacagacatgctgtcgctgcttattttcaaagcgacatgtccgcctgatgcttctgccagatatacaataccgttagcccctttgccaagctgtttgagcaatctgtaggatttgccgttccatttgccctgaattgccgtccccggtgccagactacatgccaaactcgtcaaagcgtcgttcatcatctgccaacatgctccttcttgagcggattctctcaaactgctgtgtcgcttcccggatagcgggacccgtaggggtgattccgccggttgacagcttcgcaaagagtgcagaaagggattcaagcttcggcgtccaattcagcacaagctcaacttcctggcttttcccgggaaatatacacattgcaaattcattgtgtccggcccgggaatttaaactgatggaaagatcgatcagcgcttctttcaccgtcggcagttttggcgccatgctggcactcgtatcaaccagtacaagcacttgcagatgaaccgtttcgccgagctcatcaaccacttccatcacttcgccgcgtttttccggagaaagctcttccatttcaacgtttttccctaaaatttgtttaagctcttgattgacgacaccctgcagtgtctgggtcattgcttttttcgtcaccatttgaaccgtctgagacaattgagatgcatacacaacttggtggacgccgcctccggccatggcgatgccttcaacttccttcattgcctcttggtcaatcgcgttttcttccataattcctataacattcaccgtaatcccctgctccttggcgaaagccgccattgcgatcgggtcttcgccatgattggagcagccatctgtaatcagcagaacttgatttaaatgtcccttattcacatacattcctcccggtgatacgattagtcccatcttcgccagaaggaaagtgatttatacgaaaggtttaagaaatctccttattattttggaaaactgccggcacaggtatggaagcccatttcggcgtattatgatcaatccggacgacaacgaccgtcatgtcgtcttcgatttggccggcacgcgttctgatgacctcttccattaatatatcagcgatttcctgcgggtcttcggtttttagccctttcattttccgtttcatccacaggtcgtggttttcaacatgcttcggtccttcaaatataccgtcactcatcatgacaagcagatcacccgcttttaactgttcacttacgacttccacatcaaattcattgataatgccgatcggcagattgctggcctgcactttcatgacttgatctccccgcttaataaaactcggcgttgaaccgaccttcaagaatttgcagcttgcatcctgaaggtcgatgatagaaagatcaagagttgaatagatttcgtctgtcgtccgtaaagacagaatactgttgatggttttaatcgctatcttttcatcaataccggattcgagaattttttcaagcagtttaatcgtttcattactctcataatgagccctcgccccattgcccatgccgtcactgatcgcggccgcatactttctcgcgcccagttccatcatgctgtagctgtcgccggagacaagaccgccgccttttgccgcatgagccgcgcctgtcgatacccggtaagacttggtcgaaccgaacgcgacatggctgtagccatttggatgagtcgagtgctgttcgcttttgacaagtatctgctcctcaagaatgtcagacagcatcggggcgataattttctcactctcaccgtgccccccgctgaacgggattgtcatttcgatatcaatgttgccctgctccaagctgtatatctcgacatgctgaatctcgattccgaaatgctgaagcgcctctatcatttgttcttcctgtataaaatgctgctccctttcccgttttatttcccgagaaaagtccgccatgacctcagaaacccccaacagctgctcggcaacaagccttctgctgtcctggacttttcttttcagcgtcagatgggcgtgatggtgggcaagctcgtcttcaatcagctcttccacctgtctggatttggaacagtgctgctgaaactccttttttaatctgcggtttgaggcatattgtttttcttctgtttcatgcataacttgtttcattaaatcatatgttttatcaaagttttgaacccagcatttgcttttcttataacaggattggcaggaatgctcagtaattttgcttaaaaagagatccacttccccttcttcagcctgctcatcggaagacgtctgatgaaaggtggcaaagctctccgacaaggcatgaaacacattggagaactggtctactttctgggcagtgacatctctgattttcctcgcgtactgctgctgttcctgactgtgctcagcagtgcccggtatgtagcgcgccacctttttcgtaatcgattggggcgtaattaaaaacaaggcaacggcaattaacgattcgtaaagggtggtcattaatccggcggacccttccccatataatgaactcagcagtgagccgatcactaatccgactgcggcgccggctttcttgccttccttcagcagtccgccaagaagtccggaaaacgcaagcagactcatttgatagagattcccgatattcgcgagcccgagaatcagcccggtcacaacaccgacagtacagccgatacttgctccgccgacaaaggaaaaactcagcacgacatagcgggccaggatatgctcggcctgcattccttgaaatgaaacaccggcaagcccggttaaaacggatgcgatcaagatcataaaacagatgatttcttctatttttaatgattgtttcacttttttgatcgtgaagatcggcaagctttgcaaaaagatcagcgtcaaaataaaggccaagcccgcctcgacaacagccatcacataatcataggtggtaaaagcgccgctttcaaaataaacaaaaccgattctcgcggcagccatggagaaaaacaccacgatcggcagcatcttcacccggtcctgcataatatatgtaccgatttttgaaaatagagtgaagacggccaaagctgtcagaatcagcaaagagtgtttcggcgaaatggttaaagcgcccgcaagtaacgacagacaagcatagaaggctttatctcttctgatcaaaagcattgctccgaaaaacgggagcgcaaacggaagaacctcagataatatgaaagcccgtccaagtaaaaaaccgatcacgacataaatgaaacccttatagaaaaaaagtgaatgcgcttgatgaaccgcaagctttgcagccttttcaaaaaacgattgcagtttttccagagcttgtcccgccatcggcccgttcactcttctttccgctttttccattgctctcatcccccacctgttttattcgttgcttgtcattataaatgaaagcacagataggattttgtcaaaagaaggtaacgatttcaaagaactcttcgacgctttctcccttgttcccctttcctctcgtatttcctccgacatttctcaaaaagttgtctaaatatgaaaaaatcggcttctgtaaaagaagccgattcgcttggatgacccgtacgggattcgaacccgtgttaccgccgtgaaagggcggtgtcttaaccgcttgaccaacgggccaaatatatatggtagcggcggaggggatcgaacccccgacctcacgggtatgaaccgtacgctctagccagctgagctacaccgccatataagtgcttataagcacaagttatataatacaaaggtttcttcattccgtcaacaaaaattatgaagttttaattttctgactaagaggataaataaaaaaagcatccgcgggatagacggatgccccatgtatttatagaaagcagcaagttatcctcttcttgctccgcgccctccacgttttgattccgtgtttcgttttaaagatgataagcggtcttcgctatctttaagaaacttgttcattttctgttcaaaagattctttcggacggaaatcatttctaggtctggcttgcggacggtctttagcttttttaattgataaaccaattttcccgtctttttcaacgttgatgactttcacttcaacttgatcgccgacttttaaatgttcgttaatgtctttcacataattatcggctacctcactgatatgaacgagaccggttgagcctccaggcaattcaacaaatgctccgaaatttgtaatacctgttattttcccttgcaacttgctgccaacttcaatcgacataaaaaaagtgctcctccttaggcttataaaaagatcgtttgtttaattatacctaaataaaaatttaagtgtcaacaaggctacttgctcttcttttctacattaaagagaatctcaccatttcctgacataaacaagtctcttctggcaagctctgtgacgtaatcctcatcctttaatttggaaatttcatcttttaaatcagcctgtttcccgttcaattctttcacttgtttttccagctgagctttcttttcttcattcgcgctaagggaagaggtctgtgaccacagagaacccgctaagacaatagccgtcaacaacacaagggcgccgaatacaatcaaccgtctgaaaagccctttccgccttcttttcataagctgggattgccgctcaacctgctctttatagtcgttttgaatttcagttattgtacgttctctagatagattcaaatcagacggccctcctttcaccttttcaaaatacgtatcatggtcgatctgattgttatgattagtttcttgctcttttgtaaaaatcctgcacttttttgaaaatatcgtttgaaagtaagacgccacttttcaggaagaagtttcaatatttgtttcaacaggaagaacagcggatacagcaaaaatgttacgatcttaaaaagacatttcacaaaaaaggcaatcacccgataggagtataaagaaataaacgtgatcagcccgatgagcagcttaaatagcaggaccaccggacggaacagcacgtgctgaatgagcttttttgcgaattgataaagagacaccgcaagatgaatggccaatttcagcatttttatatacattcgtttaaacagactttggtacgtcgcaatacccagtaagacagccaagaaaatgtatatcctgagttctccttcattcacgttgagcagcacatagaaaaacagcaggccttgtacaatccaaaagagaatatcatgaacgaataacagccatctggccgttttggcgcggctgacaaacagcctgtatgtatcaagcgacgctccgagccaggcgcccataccggtcattgccagcatcgtataaaattgcgtcgtcagcgtcatttaaacaacttgctaaaaaaccctttagctttatccccttgctgctcgtctaaatatacaaggtcaaacaccctgccctttatagatacaatccctttttccacatcaaggtttttcatctgcagattctcacctctgacggaaagcattcccataaccgtttccagcaaaaactcttcgttatcaaaactttccacatgcttgacgcccgaaatgtctaaatgctttctccctttcatcgttacatcatgctgttccggaacagaagaagaacctttttgctcataatatgaattcatctattcagcccccatatcctcgatacttttagcattattactgcattgtatgaggcgggagctttgtttagaacaagcctattcgccgagtttttcttctttgacgattgtatacatacctgcggcttcttctttttttgttgtctcttttaattcatttacctttacggtgacaagcttttggccgaagcggaccgtcagttcatcaccggcttttacgtctgagctggctttcgcctgattcccgttaacggtgattctcccttgatcggcgacctctttcgccaatgtgcggcgcttaattaatctggatacttttaaaaacttatcaagtctcatattagaatctcctctccatttcttttgcttcatcccacaatttgtccatttcttcaagagacatcccggtcaattcaagtccctttgctgccgcttctttttcaatataagaaaagcgtctgcggaatttgtcatttgtcatggcgagcgcttcctcaggctcaattttatagtatcggccgatgttgaccaatgcaaataaaacatcgccgaattcagctttcaggcttacttcatctgcagattcagcagaagcctccgcagaaaattccttcagttcttcattcactttgtcccatatatcctgaacatcatcccagtcaaagccggtttttgcggcttttttctgaagcttggccgcttttgcaagagaaggcagtgttttcggtacggaatccagcagcgaagaggatgttgtttgtttttccgcctttttgatttcttcccagttggcgacgacatcatgttcatcctgaaccttaacatccttaaacacgtgcgggtgccgtctgaccatcttcgcactgatgtctctgatgacatcatcaattgagaaatatccctcgtcttctccgatctgagcgtgaagcataacctgaagcatgacgtccccgagttcttctatcatgtgatccgtgtcctcttcgtcaatggcctcgagcagttcgtagcattcctcaatcatatatttctttaatgactggtgtgtctgcttttgatcccacggacagccgttcggcccgcgaagctcacgaataattcttcggaatgcagaaaattcttggtaaaggagctcttcttttctaatcggcggaacatacacacttgttaagttatttatgccgacattgcggtcaagctcaaacaaaggcaccttggtgatcttttcttccttgcttcctgctgccgttacgatgaccacttcatagtcgtcaggcaatttctccatgagtgtcagcttgacctcagaggctgtcatctggtcataaacctggcaaatgatcaggtgatggcggagttcaagctcatccggcgtcattgtttgcgcatccgtaaattgaaatccttcaatcgggtcaattcgcagtgcgttgaaggtggcgtccagaaagctttgccccccggcggtgtgaacggctgcgtgttgttcttcccggcgttcaaataacagctgaacggttttctcggcgacaaacggatggccgggcactgcgtagacgacatcctcctgcttcgctttttcaaacagaatgtcagtgatctcttcatagaccgcttcaaactgatcatgtttttcataaatatcatcaaaataccggatgtccgctgcagcctcctgctctaattctggaatcaaagggtggtctttcgttcgtatatatagatgcttcgcctgagtcagcagcttatgtacgcccactgtcagctgatccatgtctccggcgccgaggccgacgaccgtaatgttacctgccatatttttctctcctcttattcaatttgcttaaagtactgccgaaaggaaggctgctcagctcttcgtccgtaaatattttcattcttatcatacaataaataaacaaaagccctccgatgactgacgcagataaactttcacctgcagctcccgccctgctgacgggtacacataactgccaaaccttcatatatgcgagcagaaaagagaccatcagcagactgcatccgcatagacgggcaaaaacgccgccgagattcgtcagccagcccttcgaccaaattctctgcagattcaggcacgcggctgcggcaaatgccaagacggtcgccagcgccgctcctgtaataccccagcccggaaccagccaaacattcagcacccatttcagcgcacctcccgccaagacggacacggcgggaaaaacggtatgtcccgctccttgaaggatcgcggctgccgtaagcgcaatcgaagcaaaaaagatagataagctgaatatttgtaaggtctgcgtcccctcgctgttttggaaaagcatgatattcaccggatctaaaatgcaaaaaagtccggccgccgcgccgatccctaccgcaaggcagagcttaacggcagatgtcgctttctcttttatgataaacggcttgttctcatgcaccgcttttgaaattgagggaaccagggacgcggcgatactgacggcgaacaccgttcccagctgaaggagcggctgtccgcggtcgtatatgcctttcagctgtttcgcagcatggctccctgtcccgtctgaaagcagggaatataagtttaaggcgtctacgagctgaatcaacagcatcaatacactgctgatacagatggtgactgaataaagcagcagctttttcacaatgacgcctgtttcgatatgcccgccgtccgtctttgtgtctttccgcttgtaccagaatacagccaatacacaaagggccgccaagcttccggcaagtgaccccgaggcagcgcccgcacccgccgcgtataatgagcggccgcttttcaaaagccaaaaggataaaccgagaagcaccgccacacgaagaagctgttccgtaatctgggataaggctgacggcatcatatcatgcacgccttggaaatacccccggaaaatcgctgtgaacggaaacaatacaaaagcgaacgcggcgacccgtatcagcatcacaaggcgggcgtcacccataaaaccggccaacgacgccgcaccggcatacatgagcgcaaacagaacaagtccggccgccgtgacataaaaggcggaaattttcattattttttgtttatgatcgctataatcgttcattaatttcgagatgattaccggaaatccggatgttgacagcattaccgcgatccctaaaaacggatacacctgctgataaatgtaaaatccgacgtcaccgacaatattctgaaaaggaaccctgtacacggcgcttaatatcttcgtcacgatccccgcaacgacgagcacaaaagcacctttccatgctgattgccgtttggcgccaactgaatcgttcatccaaaagctccttccagccgctagaaaattacgtctataaaacgagcttattatatcacaatcctaacggccggcggaccgatagagagcacatatgaaaaagaacagcactgtttaagagctgttctttccccgtttcttatttcaataatggtaataagacctactgttccatttgtctcgccaaaaaactggctgccgtttctaccgctttatgttctacttctccaagagcctgttccttagaaaaaatgaccacggcaccgataggatcgccattcgccacgataggagcaattgtataggagctcatatcttcttcaatgtcattaacaagctgtgcggacttcacatcgttttctaacactgagctgcgctgatccatcgttttttcgagcaaatcgctgatggatttgttcagaaattcttttttcgaactgcctgaaacggcaatatacacgtcacggtcgcaaatcaagacggaatggccgagactgtcatacaatgcatctgcatactctttcgcaaaatcgccaagctcactgataggagaatattttttcaatataacttctccgtcgcggtcaacgaatatttcaagcgggtctccttccctgattcgcagtgttctccgaatttctttaggaatgacgacccgtcctagatcatcaatacgacgtacgatacctgtagctttcatctctctggtgcctctctttcatgtgatgatatttaagggaaagtactaaagttctctactttatgtagcttccgccactcgcttgaaattagtatccgtcacatcaaatgtaatatacaccagagagtaacaatttttatgaagacgcgattgtttctttcttcacgccctgaaggcctttcagcatgccgagtacggtctccagccactcttccgttttgcggcctttcgtctgtactgagattttcagctttttcccttccattcccagtccgatttgccggccgtatttattgccgagttcgaacaatttctgtccgtcaatctgtgcactggcctcttccgaaatggtaaatctgactgcgtccttatcctgcttgatgagttcgacgcgttcatattttccgtacaccttcatctctgcaactgtaaacagccattcaacttctttcgggtaactgccgaacctgtcgatgatttcatcttgaagctcgtttttctcctcaattgtagtgattgatctgaagcgtttatacatatcgattttttgcttgccgtcttgtatatagttttcagggatatatgcgtcaagctcgatgtcgatttccgtctcaaactgttcgatttttggtgtatcgccttttcgctcttcaatcgcttccttgagcatctgcgagtacaggtcaaaaccgactgagtcgatgaaaccgtgctgctgggcgccgaggagattccccgctcccctgatcgtcaagtcacgcatggcaattttaaagcctgaaccaagctcggtaaattctttaatcgcctgcagccgtttttctgccacctcagtaagcactttgtctctgcgatacgtaaaataggcgtaagcgacgcggttggaacggccaacccgtcctctcagctgatacagctgagacagccccattttgtctccgtcaaacacgattaaggtattgacgtttggtatgtctacgcctgtctcaataatggtcgtgctgacaaggacgtctgattccccttccagaaaattaagcatgacgctttccaattcattttcggtcattttcccgtgggcgtacgccaccttcgcatcaggaacgagcatggaaatttcgtcagccttccgctcaatgtcatccacgcggttgtataagaaatatacttgccctccgcgcgccagttctctttcgatggcttctcttacaagcgccccgttgtattccacgacatacgtctggacaggaaaacggttttccggcggcgtttcaataacagataagtcccgcacaccgagcatggacatatgaagggtacgaggaatcggagtcgccgtcagagtcagcacatcaacattggctttgatctgtttgattttttccttatgtgtgacgccgaaccgctgctcttcgtcgattatgagcaagccgagatctttatagacgacatctttagataaaagcctgtgggttccgatcacgatatctaccgttccgtttttcaggcctttgatggtctcattggattcttttctcgttctgaaccggctgagaagaccgatgttaatcgggtagtcttggaaacgttccataatggtttcgtaatgctgctgtgcgagtatcgtcgtcggcacaagcagcgcgacctgcttcccgtcggcgatcgctttaaaggccgcacggatggctacctctgtcttaccgtaaccgacgtccccgcaaagcaagcggtccatcgggcgctctctttccatatcctttttaatttcctgaatggaacggagctggtcgtctgtttcctgataagggaaagcagcctcgaactgccgctgcatttcatgatcaggcgagaaagcatagcctttgcttgcttcgcgttccgcataaagcttaatcagatcatcggcgatgtcctgaacggaattttcgacttttttcttaacccgtttccattcactgccgcccagtttataaagcttcggttcttttccttcagagccgacgtacttctgcacctggtcgatttgctctaccgggacgtacagcttatcgctgccctgatagtgaatattgaggtaatctttatgaatgcccttgatttcaagtgtttcgatccccaaatacttaccgatcccgtgattgacgtggacgacatagtcaccgacttgaagctcggaatagcttttgatccgttcggcatttgtcagcttctgctttctcggcttcttcttgattcggtttttgaacagctcttcctctgtaatgacggccagcttcatcagcggcagttcaaaaccggattgcagttcgccttccatgacatagacctgtccttgcacaagcgctttggagctgtccgtttttgcggcttcaatttcgtaatcagccagcacggatgccaatctgtcggttctgtccttatttgcccctaaaaagacaacggtgaagtttgattttttaaagcgctccatttcaccggtaagcacattcatctgtccgtgaaaattctgcatctgccggcttgtcacattcacgatgttttgagggcttgtatgctgaacatgacgcaaaaataatgagaaataaattgccggacgccgcttttggcccataagctcctgaaagctgaaggataagttaatgtcatgcagaattttcccttcctccagcagacttgtcgtaaattcggcctcttctttttggagctgatcctccatttcatgaatgcggctgacctcgtctaacactaacaaggtgtctgacggggtataatctagcaaactagcaggtttttcgtaaaagtacgagagatacttcacaagttcctgatcagtctgtcccgttgataatcgttctttatcatgtgagatgttgatatgaagcatttctttttgtttgtcctgcttcagctttttcagactgtcggcaagccctttatcgagcctatccatcgcgcgggctttttcttccgcccggatgatcagttccttcgccggtccgatcgccaccgttttgagcgtctcaattgatctctggtcatcagagttaaagcttctgatggagtcgacctccgtatcaaacagctcaattcgcaccggatgctctgatgtcagcggataaatgtcgataattccgccgcgaatactgaattcaccgggtgcagaaaccatatcggaacgctcataccctacctcaacaaggcgggcagacagctgatccggttctatatcgtctccaagcgaaatgacgatttggctgcttttccacagctccttcggcggaagcattcttctcactgccgcaacgggcgccacaacgaccggggcttctccgtttgttaatctattaatgacatcgagccgctgagcccgcagttcaggactggctacagcaatttctgaagaaatcaattcatttacggggtatagaaaaacagattgatccccgagaagcgccgtcagatcttctgtcactttttgggcctgatataaattatgggtgataaagaaaatcggccttttcgtttcctgtgcaagggcggaggtaaaaacagaacgcgcggaacctgacagacccgcaagcagctgttccttcagcccctcatgtaaaccgttaacaatggatttaaaatcatcgctttctttaataaaggtttgaatattgtccatatgggcccctcctctctgttttctgcaagaacagaaaaacgctttggtctagaatctacaccaaagcttcttattgaataaatgtgttgtgttcatggtagtgcggattccgttccagcgcctcttggcagtcttcacaaattgtaagaacatggagatctccattgtctttatatgaaatcatatcgtttctttcctcatttgttaagtgctgaaatccaagtgactgtgtcggcaccgtcgtatattccaggctccctaccttaataccgcagtggcggcagaaataatgcaaagccatacattggacctcctgatgtgaaaaaatcatttttccctagtatggtctcccattatttatcttatacatttgcgttgaattcgttcataacttctaaaaatggtttcgttaaggaagcttcgcaggcttttaccgtttttgagacagcatcattgatatgcggcgcttcttctttcgtaaaagctcccagcacatagtcaacgactttcatcccgttggcgggacggccgattccgattctgacccggtcaaattcaggggttccaaggtgctgaataagtgatttaattccgttgtgtccgcctgcgctccccttcgtccggagtctgattttccccgtaggaagatcaaggtcatcgtatatgactttcaaatcttcatggtcggcatcataataatccaacagcggccgcaaacattctcctgataaattcatatatgtaagcggtttaacaagtagaactttttttccggaaacaaaacccattccgtaaagtccgttgaatttcgttttattcagttcaatattccattctttagaaagctcgtcaatggccataaagccgacattgtgtctcgtgttctcataggttttccccgggttacccagaccggcaatcacaagcatcgtaaatcctccctcaacatcgctgtaattcttctcattctagcacaaaagacgtaacctcgggcgggttacgtcttaaagcacttattgattttctccttcgggctcttcctcaggagatggttctgcatcttcttcgaatgcttcctgcttaggaggaaggatggaagccacgacttcttccggatcgttcgtaaatgtataattgccgtcagcagtcagatccgcgatggtcagcacatcattcatttccagtccggaaatatcaacatcgattgtctgagggatgtccttcggtttagccttaatcgaaagctcatgcagcggctgctggatgatacctccgtctttgactcctttcgcctctcccgtcagctgaatcggcacctcagcctccagctcttcactcatattcacgacttgaaaatcggcgtgcgtcaattcgtttttgagcgggtctgtctgaagctcagtcaccataaccgattgctgatttccgttgacatcaattgtgataatcgtgttttttccttcgtcccgcaatgttttaagcaattcgacactgtctaaagagacaggtgtattcgttgtttctttaccgtatataatccccggaacgtgtcctgaatgacggattttccgaagcgtcgaacgtttaaaatctgttctttcatttgcttttaaagttgccatattcagcaccatcctaattatcgttttatcgtcctattagaacaatacccacgatagccggaatttaaaccttaaactttcggtttagctgaataaatagctgacagattgtttctcgtgaacgcggataatcgcttcagccagaagcggtccgacagaaagctgtttaaagcgttcgatttttttctcctcaggaagcttaatgctgttcgtcacgacaagctccttgattttagagttattgatccgctcaacggcagggcctgacaatacagggtgcgtacagcatgcatacacttccgcagctccgttttcaaccagcgcgtttgcggcaagtgtgattgtgccggccgtatcaataatatcatcgatcagaatcgctgtttttccttccacgttaccgacgatgttcatcacttctacctcattcggtctaggacggcgtttgtcgataatcgcgatcggcgctttcagacggtccgcaagtttgcgggcgcgcgtcacaccgccgtggtcaggtgaaacaataacaatatctttcaagtctttaccttcaaaataatggcctaaaatcggaacacccattaagtggtcaatcggaatatcaaagaaaccttgaatttgcggcgcgtgtaaatcaagtgcgattacgcgtgtcgctcccgctgtttcaagcaggtttgcaaaaagttttgccgtaatcggttcacgtgatcttgcttttctgtcctggcgcgcataaccgtagtacgggatgacaatgttgattgttttcgcggaagcgcgctttaaagcgtcaaccataatcagcaattccatgatgtgctcgttgaccggcgcacttgtagactggatgatgtagcaatcacagccgcgaatactttcttctatgttgatctggacctctccgtcactaaatcttgtaacagagcactttcctaattgaactcctacattatccgcgatttcttttgcaagttctggatttgaattcaaagaaaaaatctttaaattcttatctccgtattcgttagacatggtaaacctccgattttaggattattttttatgaatgtttttcacataatcttctttatttacttgtcttgctctggcaatggcaagcgcttcgcccggcacatcttctgttacggttgaacccgcagcgacgtacgcgccttctcccactgtaacaggagctaccagattggagttgcagcctataaaagcgccgtcttcaattttggttaaatattttttcttcccgtcataattgaccgtgatggagccgcagcccagattcacgtccgtacctacttcggcatcaccgatatagcttaagtgagatgctttgcttcggtcgccgaattgtgttttcttgatttcaacaaagttgccgattttcacttcattgccgattgcagaatcgggtctgatgtgagcaaatggaccgatatttacatcattcccaactttgctccgattgacaacggattgtttaatcacagtacggctgccgattgagctgtcctctatctcagtgtgagggccgatgacacattcatcgccgatttcagcttgtccctttaacacagttccgggataaataactgtatcttgtccgatacgtgcgtcaggtgagatgtacgtattcatcggatcaattaaagtgactccgttttgcatatgacgtttgttgatacgctctttcatatacatttcagcctgagaaagagcgactctatcattcactccgagcgtctcttggaagttaccagtctggtaagcggcaacagtttcgccttcgtctttgaggatttcgataacatccggcaggtaatactcgccttgggcattttcattcgaaacctgttcgatgacacgaaaaagagcctcgttatcaaaacagtacgttcccgtgttgatttctttcacaagacgttcttgctccgaagcatccttatgctccacgattttttgaacggcgccgtcttcgctgcggataattcttccgtatccggcgggatcttcggcaacggccgttaaaaccgtggctttcgcacctttgtttgtatgttcattcagcatggcttccatcgtctccgccgtcagaagcggtgtatcgccgcaaataacgatcgtgacacccttctccccgtgaagaaatggttttgcctgcttgactgcatgagccgtaccgagctgttctgcttggattgcgtaatcgcttttctgtccgagctgcttcttcacatcttcggcgccgtgtcctacgatggtgacaagcttcgctaaagataatttcagagcttcgtctgcgacgtgctctaccataggctttccgcataccggatgaaggaccttataaagcttcgatttcattctcgttccttttccggcagctaaaatcactgcaaaccgcttatccatttaatggcctccaatatcccttttatccatagaaaaatatatcctaaatagctgttgatttcaagaagacatcaaaaagtgcaagaattttctatgtaatcgctttattactgaaaaatcagatttaaaaaaggactgccggaaaaggccttgtgtcagcctttatcagcagtccttacattttgttattttaagaagccccggcttcttcatattctaatgcttcagaatcacccaagcgatggtactcatttaaaacagcatcctggatcttgccccgcgtgctggaattaataggatgagcaatatcgcggaattctccatcaggggtgcgtttactcggcatcgcaacgaaaagaccattgtttccatcaatcacacgaatatcatgtacgacaaattcgtgatccagcgtgatggatgcaatcgctctcatgcgaccatcggtattcacgcggcgtaatcttacgtcagtaacttccacagtagttcaccaccttttccctatataaaagcattagtctaacaattccacgattctctttaaattcctgcacgtttcaaaaagttttttttgaaaatataggatatacatacacaattaggtgataaatcatattcgggaatcatatactgcataaaaaaagtgattccggagtccggaaccacttttctgagatttaagatttcaccagcgcaatgacttcaatttccacgagagcgtctttcggcagtctcgccacttccacacaagaccttgccggcttatgtacatcaaagtattgtccgtacacttcattcacttccgcaaactgctccatgtcagcaataaacaccgttgcttttacaaccgtttcgagagaagcacccgcttctttgaggacggcctttaaattgctgaacacctgatgcgtttgttctgtgatatcaccgtttaccatttctccttcagcagtaagaggaatctggcctgagctgtaaaacatgttatttacgatgatgccttgtgaatatggcccgatggctgccggcgcgtgtttcgtatggattgcttttgtcatttttctgtctccccattctttaaatgctgttctttaaaaaatcgcagaaaattgccgttttgaatctcaatcgttttgtctttcatgttgatggttgaaagggtaagcagcgacatgtattcatcgacaagccgttcattcactccctcagcttcaaccaagacgcctatacccgcgacgttcgcattaaactcatcaagcaggctgatcatgccgttaattgtgccgccggctttcataaagtcgtcaataatcaaaacgttcgaccccgtggccaaacttcttttcgcaagcgacattgtttgaatgcggttagacgaccctgatacataattgatgctcactgtagagccttccgtcactttattgtcttttcgtacgatgacaaccggaacgttcagataactggccgctgcgtaagcaagagggattccttttgtcgcaacggtcatcaccacatcaatctcccgctccgcaaaaacggaagcaaaaagcctgcctgcattagagaggacagaaggtttgcctaagatatccgttaaatatacataaccgcccggaaggatacgctcaggatttactaaagactgtcccagctcctgtataaacgcttctgcttcagcctgttttactttcggaatatatttgacgcctccggcagctcccggcactgtaagcagcgtcccaatgccttgctgttcgaaggtctgtttaataattgttaaatcttcactgattgatgactttgctgattgataccgttctgagaaaaacgttaacggtattaattcatgcggatgggttaacaaataatttgttaagtccaccaatctgccgctgcgacgaaacttcatgaacttacccccaaaatccgaataatttaaaaataatataacttaacatacggatttaatcaagagcattctgttcgccgatcatccgcaccgcgtacacctgatcacagaaacctcttaacccgttataaatccgctgcacctttgattcgtattgaaccaaaccgaatacagtcggtccgcttccgctcattaacaccgcgtcagcgccgaagcgtttcatttgatttttaatcatcgccacctcgggatgaaggttgagcgtaaccgattccaatacgtttcctaattgtccgcaaaccttttggaaacttttttcttcaattgcgtcaatcatcgcttgtacatccggatgccgaacctgctgcaagttcagccggcggtacacttcggcagtcgataccccaatcgtcggtttggcaagcacgacccagcaatgaggcggagcactgatatgcctgatcttctcaccgcgtcctgttgccagggcagttccgccgtatacacagaaggacacgtctgaaccgatttcagccccaagctccgcgagctcttcaacagaaagctttaaatcccagagtctgttcagccctctgagcgtggctgctgcatcgctgcttccgccggcaagccctgctgctacaggtatcacttttgtaatcataatagaaacgccttttttgacttggtaccgttctttgagcagtttggctgcctgataagccagattccgctgatcatcgggaacaaagcgattatgcgacgccactctgatcacgttttcgggcagttctgtcagttcaatccgatctgccaaatcaattgtcgtcatgatcatctccacttcatgataaccatccgggcgtttactcgttacatcgagggacagattgattttggccggcgctttttctaaaatacgcatagctttcacctacttctccatctaaacataagtatgaacattgtatcacatttggagacccggaggtacttatccgaaattggcgctgattttgacagccgatagaaaaaaaccggggaacggattgtcccccgggccactgcattatcggttattttggttctgagccgccatctgctgttcggcaatctcgattgcgcgctttaccatattcccggcatcgcgcgcccgaatgcctccccagccctcgtttttcaccgtatcgtaaaaaccaaggtcctttgccagctcatatttgaactcatctgacataactccacgacgtctgcccaaacgaaacaaccccttttatagaattgatcaccattcgtgcacgccacgataaaacatgtgacatctatagcttccgtttaatcggctgaaactttcgagggaataattagaagagctttagaaggcaaaacaaaaagcagtaaacaaaaggttcactgcccattaaaatgctactgagcttgccgcatcatcattgaatgtcaattcaacagtctcagtaagaatatcagcataactgtatgaaactctttcaaacgagttctcgtcttgatctagttgtatcacaaaaacagaagggtacgtctcagctaaaatgcccgaacgctcaatcgtttttcggcggccgccgtttgcttttaacgtaagccgtttacctaaattcccatcaagcgatctttttatatcggacaacgtcttcgccattgcatccacctcactacatttattgtacaacaagagcccaattttgtcaaataaaatttaaattatatcaacgttatcaagtcattgtcaacaaaattattttgacaaaattctattgatttctacgttatttttcgcaagttccggtaatttatgtatcaatatgtaaaataattaacccgcatagcgaaatttatgcgggtttttcactcatccatttgatttatacggcataccgacacgcaacacacctttcgtttcaattcctcccagccctttctctcgtgtcagagtgtttctcaggacatcccacacattgatccgctccataaacggagtgaagctgatttttgcgacaatatagaccgggtcaagcgcatggatgttgacgcgtgacggtgaacttgcaaaattcgcacccgctctgattaaagactcgaaatgggattggcaggcacccgcgaatatcaccagctggtccaagtgagggactttccgcctcgctcgttgaacggtttcgacaaaatgtttggaatgcctgtaggcgcttaaatcgttcacgcctcccttatgcttggaataagcatcgtgaccggtgatgactaaaatatccggccggtatttgtcgagcagctcctctattgaggccgccatttttttctcatggcaatgaatcccgtatacaggcacaccgattttttcgtaaaagttcaggcactttttcaaataagcctcatcgccgtccagatgcaataccttgccgggcatatgaaagtagtgctcctgatgctgatattgatttgtcgcgtaatattcctgtttttcccgaagcagcttataatcctggcggagcagctcgagagattcattcatcctgctttcatctttctgctttctcacggcctgttcgtcttttcttacaggctctaaatcagaaaaatcagcatccgcaatcaatctgacttcgtcaccatgcaggatggcaattgaatttcctttgcttgtttgctctatgccgataatgcgaaataaaacatccatttgataggatttcctggctaccatatctcctatttgaaattgcacgttacccactccacaaatagactaagcctcatcatgaaagaagccttatcaaatgcacctctttccgctgcggcgcttgatgtttcaagcttttcttgcagttgaatgaataaggttcttctctagcctatgtagcggcagtccaagtggtgacgcaaaacaaaaagcccttcttagaaaagggctttatacaatccgttggacaggagcgcgaattcttctatagacagggattcaccgcgccgctttccgtcaatattcgtttcttgaaggacttcttcaatttgaggttttttctcttttccgcccgggagattgttcacaaggttgttcagcaaagttttccggcgctgagcgaagcttgctttaatcagctggaagaaaaatgattcattgtcgacgtccaccgccgggccgtcacgcagcaaaagccggatgaccgcggaatcgacattaggctgaggcacaaacaccgttttcggcacggtcatgacggtcttggcctccgtgtagaactgaaccgcaatggaaagagatccatactccttagaggaaggatctgcggccatccgctcagcgacctctttttgcagcatcacgacaattccttttaacggaagatgttcttccaaaagcttcatgatgatcggtgtcgtcacataatacgggagattcgccgtcaccataatttcatcacagtcctgaaactgctcttcaataactgacttaacgtctgctttcagcacatcatgatgaatgatcgttacattgtcataaggagacagcgtgtcattgagaatgggcaggaggcgctgatcaatttcaaacgcgacgacctttttcgcccgtttggcaagctgctctgtcagcgcgccgattccgggcccgatttcaatcacaccggtccgatccgttatttctgcatggtccacaatcctgtccaatatgtttgtgtcaattaagaaattctgtccaagactctttttaaaagagaaaccgtactttttcagaatttccttcgttctgataggtgtcgcgatatctttattgttcatcctgttcctcctgcatcatagcatcgagcgcatcaataaaatcacttcttttgatttgaaacatttgcagccgtttttgaagctgtttgccgtttgtatatccgattttcagcaggtcgcccaaacgttcgcggcgtcttttagcagccggcccgccgatcagaccggcctgtattaaatcttcagctgaaatctcactcggctttgcctccatctcttcatgcacattttccagacatgctctgatgctttcaatggatgcgtgctcaacgcctattccgcgcttgtttttcggtttggcaagatgtttgggcagaaatgcgtgtttacagccgggcactgcttcagaaatggttttccggatcttttccccgggaaaatccgggtccgtcagcacgatgacccctctcgtttcctgcgccagccgaatctgcctgatgacttcgtctccgatcgctgaaccgttcgtctcgatcgtgtccgcatcaacggcaagttttatgcgcgcggtgtcatcgcgtccctcgactacaataatttctttaattttcattacttcctccaaaaaaactttttatatccaaaacgaaacctttgcttacatgtcacgtctaatatactgaaaatacactttacctattataacgaaaaaaacagagggcgcaaaaccctctgaatgaatcggaattaatttaagatttttattttgacctgttttttcccccagcggtaagccgaagatttttcagggaaaaagacatcaatccgtcttcctttaatggccgagcctgtgtcagcggccacagcgtccccatatccgtctacgtggactcttgtgccgagcggaatgacgcttgggtctaccgcaatgactttggcattcggattacttgtcaggttaacgcctgtagccgtatggccggaacagccgctgcagcttgcggtatatgccgtggaagacacggtaatcactttaccggaagatccggcttcgcccgaagatgcctttgcactgagctgctcaatcttgggactgtgccgctttgtgccgaccgcaatgatctggtctttgcttttttcagatgtttcttctttaacaagctttctcgatacttcttttccattttctttaacaacatgaaaatgctttttaagcttgccttcttttcctttttgaacgatcttttcttccccgctgtcgagtgacgcatcttctttttctttcacttgatacgctattttttcctcaactacatcggtgactttttcgatacgagtgatttgtatgccggcttgatcttttgtgagcttttcgtgtaatgccggttttactttatcttcgtctttcatgtccatcttatgctgcgttaaaaagtcagcgaccgtagtcgaagtcgtccatattttctttttctttcccgcatcatttacagtgacctgaaaagccggatctaccgtgactttcatgccgtttgtcactttcgtatctgctgccggatctattttatcgtgctgattcacaggtgtatgctgttcgtctagaaatgcgccgactgtttttgccgttgaccataaagtcttttcttctccgcctcttgtcacgcggatctgctttgcagcttcatacacgacattcatgttgtctgccaatgctgtctgcttagagggggtaatccggtcttcatttctcgtctttatatgtaaatcttccagaagttccccaactgtttttgcatgagtgcgtatttgctttttcttgccgttgatggaaacagagactgattgttttgagagctcatgcgccccgtatgcagtcccggttcctcccagcagaataatagctgcaataagaataaccttgcttttaccaagctttacggaaaacagttttttcattttttgtgtgatgaaaaacgcctccttctcctcggagagattatatagagtatctaaaatgctgtcaaccctcccatctcgaagatcaaaaaccttcagcgtatccctcattatgcaaaaacaaagcaaaaaaaggaagaaagagatatcgacaacctatcttatgagaagaaggaagcttgtagaactgtttgatatatcctctgaatcggacaagcctttacacgttacgacagcgcattctgtcagttcatgcggaaaagtctttttgcattttcagttgtaatcgaagcaatttcttcatacgtcagtccttttaattcagcgagctgttccgcaacatatttcacgtagcttggctcattccgtttgccgcggaaaggatgcggtgtcaggaaagggcagtccgtttcaatcagcaagcggtcattcggaatttcctttgccacttcttttggtttcttcgcatttttgaaggtgaccggtccgccgaatgagatatagaaattcatatccatacactgccgcgcaacctccgcgctgcccgtaaagcagtgcataataccgccgacttcttcagccccctcttctttcaaaatcgtgacaacatcttccgttgcatcgcgattgtgaatgatgattggaaggttcacttccttggcgagcgcgatttgttttcggaacacctctttttgaatatcctttggtgatttgtcccagtgataatcaaggcccatttctccgattgccacgactttttcgtgagaggacagttccttaatccacgttaaatcttcttctgtcatgtcgattgcatctaccggatgccagccgatcgcagcgtatataaagtgatattcctcaatcagttccatcgcccgcgtgatagtgggtttgtcgaatccgacaacgacaattcgttcaaccttttcagcctttgcacgagcaatgacttcctcaagatctgtgtcgaattgctcggcgtttaagtgcgcatgtgtatcaaaaagcatcataaaaactcctttcttgttgaaaaacaaaaggtgttcgacggaatgttacacgtgaaacaccttttgccccttattatttaattctagtgcctttcggtaatgactgatcgacagctacaaccttgaggacaccgtcagattctcctgcgaggatcatcccttgagaaagctcgcctctcagttttaccggttttaagttcgttacacaaatgattttcattcccacaagctgatccggtgtgtaatgtttcgcgatacctgatacaacttggcgctgttcaaagcccaaatcaatttgcagtttcaacagacgatccgctttttttaccggttctgcggacaagacttctgcaacgcgaagttctgtatccatgaattgatcaaacgtaatttcaggaaggcgctcaacttcttgcggctcttccgccttttcttctttcacaggagcagtcccctgcattttttgcttgatgtaagctacttcctcttcagcttcaagacgagggaaaagcggttccccttttttcacttttgtgctctttaattggccaaatgtctgaatgctgtcccaagctttaagagactgatcctcaactccgagctgggcaaacattttttcaggtgtttgcgtcaagaaaggctgaagaagtacagccgaaatacgcaatgattcagctaaatgatacatgactgagcgtaattctttttctttttccggatcttttgccagcacccacggagcagtttcatcaatatatttgttcgtacggctgatcaattgccatagcgttgataaagctactgaaaactccatgttttccattgccttttcataagcttgaaccgtttctccggctacagaagaaagctcttgatcaaaatcggtcacatttccttcatatgaaccaatctcaccgtcaaaatatttttggatcatggcgactgtccgattcagaagatttcctaagtcgtttgccaagtcataattaattcgttctacgaaaccttccggcgtaaagacaccgtctgaaccgaacggcacttcgcgaagcaggtaataacgaagctcatccaagccgtaacgttcaatcaatgttaccggatcaacaacgtttccttttgatttcgacatttttccgtctttcatcaataaccagccatgcgcgaaaacttgcttaggcaacgggagatcaagcgccatcagcataatcggccagtagatggtgtggaaacggacaatttccttaccgaccaggtgaacgtcagccggccagtactttttgtaaagctcgtcattttccgtatcgtaaccgagcgctgtaatatagttgaataatgcgtcaatccatacatacacgacatgcttcggatttcccggcacttttacgccccagtcaaacgtcgttctggaaacggccaaatcttcaagacccggtttaatgaagttattaatcatttcatttttgcgtgattccggctggataaatgaagggttttcttcataaaacttcagcaggcggtctgcatatttgctcatgcggaagaagtatgattcctctttgattaattcgacagggtggccgctgtccgggctttttccgccgacaacctcgcccttctcattacgttccacatccaccagctgtgtttcagtatagaatgtttcgtcaggaatgctgtaccagccctcatactcatccagataaatatcaccattatcaagaagcttttgaaacactttctcaatgatttctttgtgccggctttccgtagtccggatgaaatcatcgtgagaaatgtcgagctgcttccacaatttttggatttcagcaacagcgcggtctacatacgcttgaggcgtgatattctcttcctccgctttctgctggattttttgtccgtgttcatccgttccggttaagtagcgaacgtcaaatccctttaatcttttgtaacgcgccattgcatcgccggccacggtagtataagcatggccgatatgtaattttccgctcggataatatatcggggtcgtaatataaaaagtattattctcttgcggcatgttgcaacctcccattcagaatgtcgaaaagctcacgcccaaaggacgagagcggttttatttgatatacaatattgatatttgtcctctatctatgataccatcttagcctttaagatcaaggatatatacgtactgcgcgtaaaagagtaaataaaattaaaaatttttattgaaattaaataaagtcttaacatatcgaattttgtcgtatataatctactaatataaaacatcttggttcgaaagtcttgatttaaaaggattttccataggataataggttcgaaaaagcagtcaaaaagcctgttatttcaggatttccaaggctttacttactataagaactaattcttacaaacaatagtaaacaaaatgattgacgattattggaaaccttgttatgctaggaatgtaaggaattttgtcgaataatgacgaagaaaaatataaactacaaataattatctctcgggaggagactgttaatgaaatctactggtatcgtacgtaaagttgatgaacttggacgcgtagttatccctatcgaacttcgccgtacactgggcatcgcagaaaaagacgctcttgaaatttatgttgatgatgaaaaaatcatccttaaaaaatataaaccaaacatgacttgccaagtaactggtgaagtctctgatgataaccttaaacttgccggcggcaaattggtactcagcaaagaaggcgctgagcaaatcatctctgaaattcaaaaccagcttcaaaaccaaaaataagttatttcatacaaaaaccgttcttgttgtgacgcaagaacggttttttttatgattgaatgtgataagcgtcatagatctcgcgtttcggtacgtcccgatctaccgctgtttgttttatggcctgtttggaagaagccccttcatttatgtaatgttccacatgctctttttcagaaagctccatccaccagggtttgtcgtcttcatccggttcagcggcttgattgccttcgacaacgagacagaactcaccgcggatttggtcttcatttgcccattcaattacttcggcgatcgttcctctgatgaattcctcgtactttttcgttaattccctcgtgacggcgatgtttcgatttcccaaaacggcatgcattgctgttaatgtttcttttaacctgtgcggcgcttcgtaaaatatcatcgtttcctgccgttttttcaggatttcgagttccttcttcttttcttttttctgtctgtttaagaatccatagaagaaaaacggctgcggggtgatacctgatgcggtcagcgcggttaacgccgcatttgctcccggaagcggaacgacatatccgccgatttgggtgaaatctcttacaatctcagcccccgggtcggaaattgtcggcataccggcgtcactgaccagtgccacattctttcctgttttcagccattcaatgattttatggccgctgctttctttattatgttcatgatagctggtgagagatgtttctatgtcatagacgtgacacagctttttcgtctgtctcgtatcttcggcagcgatgacatcgaccgatttcagcgtctccactgcacgaaaggtcatgtcctccaagttgccgatcggtgtaggaacaagataaagaattcccatttcggattttccgttaaaactcatctggcgacttaacatatacagcctccttgctgcttcgtttttcttctatatattgttcttttttctttcgggtcagctgcttaaaacgatattccgcctgcatcgcttcccgttttgtttcaaatgattccgcatggcataacgaaaccggccttctcgcccttgtgtactttgcgccctttccctcattgtgggtcttcagccgtttttgcagatcatttgtataaccggcatacagactgttgtcattgcacagcagcacataaaagaaatgactattcgtctccatataaaatggtgcggatctctttcgtatattcattttgttcattatatacaaacagcggaggaagaattttgagatcagggcggccgcctttaatgccttcaaccaaaatggtattcgcttctttaccttgtttcggataaataaactgcacccgtttcggttctattcggtatgctttcattaattcaaagatttccaaaagccttcccggccgatgaacgagggccgcttttccgccttgtttcagcagtttgctgctgacggaaatcacatcttcaagcgtgcaaagaatttcgtgccttgcgattctgagatgttcgttcagattctgctcagcctctttcggcgttttaaaataaggcgggttgcaagtgacaacgtcatatttattatgtccgagtctatccggcatatttttcagatcatcatgaatgaggctgatctgaccgcccagaccgttgtattcgacacttcggagcgccatatcatacaaacgctcctgaatttcaacccctgtgatatccgcttttgaccttgtgctgagcaaaagcggcacaatcccatttcccgtacataaatcaacgatgttgcccttttgaatcggaacgtatgcaaactttgacagcagcacggcatctagcgaaaaagcgaaaaccgtcgggctctgtacaattttcatatcctctgctaataagtaatccaatctttcatcatcacgtaatgaaaccataatcttattcctttcagcactctttgaaaaaggcttccgacatcagcggaagccttttccttattttttatttaagaaggacagacaaaaaaggcaatctcccttgcggacgctcccataatggacgttgcaaatatgaaagccttcttgatacagccgggccagattatcgtacccttctcctatatcactctgctctgccttctgtgtttttgtttctttctgatcggccttgaatttctcaatttgctctgtcgtgtcatcaagccgcttccgcaaatgcttattttcaagctgcagatggtgattctcttcaatcatttcgccgatatgctgctttaagtcacccagctgacggtacagcgaaccgatttgttcctccaggtttatgacagtatcaattaactcttttttatccaaggttccacacctcgttaatctgtggtttgtgcggatacgacgccctcttccaagagctcttcccaagtatattctatcactttttcacgattcttcagttccacctgaagcacccgttccagaatattaagaccgacaacctttgcggggccgtttgccgttgtaatcatttcgcctaaatccggtagctgttctttcgccgtctcatactcatcattttcgtacttcaaacagcacatcaaacggccgcacagacccgaaattttcgttgggttcaacgataaattttggtccttcgccattttgatggacaccggttcaaaatcaccgaggaacgtggagcagcaaagcattctcccgcacgggccgataccgccgagcattttcgcttcgtctctcacaccgatttgacgcaattcgattcttgttttaaagatagaagccaagtctttgaccaattccctgaaatcaacccgtccgtcggctgtgaagtaaaaaatgactttattgcggtcaaacgtaaactcaacatcaaccagtttcatatctaagccgtgatcagccacttttttctgacagatttcaaaagcggacagggcctcttgtttgttttcttctacaatgagaagatcgcgttcatcagcaacgcgaatgacttttcgaagcggaagcacaacatcatgctcgtccacttgtttatttgcgatgacaacctgtccgtattcgacacctcttacggtttcaacaatgacgcagctgtcctgttctatatcaaatccgttcggatcaaaataataaatttttcccgcttttttaaagcggacgcctattacgttgtacaagcttatccctcctgcaacgttaacaccaagtgctccattaatccctgcgcattcacattggaatgaagccgtttttttgcttctaaaacagcgagaatttggttcgtaacgctttgttgtgtaaattgcagcgcatgctgttttattgattggaataagtcttgataaatcagtttatcttcatttccaatttggatggataatacatcacggtatatcaataagagcatatcaagacccatttcttgatgggttttttctttgaaaaagggcacccactgatcctgaatgaagaaaaaggcatgtcctttccgctgatgtaagacttcatacaattttatcactttcgctctggactctgcaaactcatcatttcgacttaattcgactgcttccgcaatgttatttgtcatatttgctaagagtctggccatgtgagggcttacttcctgctccatcagtctctcttctatcgctttcggctgaagcggctgaaacggaagaacctgacatctcgaaacgatggtatccagtattctgtggagctgctcagtaatgagaattgcgatggtgtcttgactcggctcctctaaaaatttcagcagactgtttgccgcatttgtcgtcatttgatccgcatgggatataatgtacagttttttatgcgattccagtccggttttagaaaactcctcctgcagcgattggatctgagcctttttaattgatagtccgtcgggctgaaccacgtgcaggtcaggatggtttccggatgcaatacgcttgcagttccggcactccccgcatggctcagtcccggcttcaaggcaaaaaaagctttttgcgagaagcagtgcggcatccaatttgcccgtaccttttttgccttcaaacagatatgcgtgagaaagccttttcttttcaatgctattatgcaaaagccgcatcactctgggctgctgctcggtcatttccttccatgatattgccattgtatcactctctatgtgtaaaggttaatcaataaaccttttatttctccgattcgatccagcaaatcaattgccggtttttcctgatccaacatctcttccgtcagctgaatcagtttttcatctatttctttcacaagtcccagggtccggctgttgccgtacaggtcgaagcttttcgccgtctcatgcgataacccgctgtctacggcctcttttacaaaacgcttcaccagccctttgaattttgctaagtctttgaagttcctcgatttcgtcagtcttttcccgaacgtttctatatccgttaagaacctgcttagctgatcaaacttcagcttactgctttggctgtccattgaacttttaaaagttccggaaagctctgccactttataggcaggctgctgctttttctcaataaaggtgcgtaagtcagaatttattttcacgtcgtcaaatccttaaaattgatgaaattcatcgaccggaaggacaaagaccgtcgctccgccgacttccacttcgacgggatatggaacgtaagaatccgcattcccgcccatcggggataccggggcaatcatctgatcgcgtttacagccattttctttaatgaggctgagcgctttatcgacacggatatcttccactccgatcataaacgtcgtattgcctgatttaagaaatccgcctgttgtcgcaagcttcgtcaccctgaagttgtggtcggttaatactttcaaaagcctgttgctgtcctgatcctgcaccactgccactattaatttcattctctaggccccctttaggttggaaagaacattgtcgttacattcattatatcaacttatgagaaacaggtcacaactgaatttttttcaatgcctcatttatcacctgaagcgcgtcttgaatgacgaattccttctttctcgatgcgtcgattgtatggaatctttccggaaaacgctgcatgactttttggtacccttcccgtactttcgtgtgaaaatgcagcgcctcaaggtcgagacgattcttttctcttgaatcattcgacgtaatccgtttcagcccttcttccggatcgatagaaaaatagatggtgacatcaggcatcgtatcgccaattgcaaaccggttgatagaaaaaacttcatcaatgcccagtcctctcgcatagccttgataagccagtgagctgtcgatgaaacgatcacacagtacaatgcgcccttctttcaatgcaggctgcaccttttcgactaaatgctgtcttctggccgcggcgtaaaggagcgcttccgttttggcatccatcagtgtattgtttttatttaagatcacttctctgatctgctcagcaatgtcaatgccgcccggttctcttgtcgctgtcaccgggtgcccctccgccgacagaatatcttttatttcctgaagcactgtcgtttttcctgcaccttcaggaccttcaaatgtaataaataaaccgctcatgatttctcctcttctgtataaacaagtaattgttccccgtttaacaagccttgaatatgcgcatccatgccgattaaacgggaaagcttttgtacgatctcttctgttatccgttctccgtccatgataagcgggattcccggaggataaggaataatattccccgcatgcaagcgaccggccgctttattcatatccgtaagctcttttgcaaacttgcgcatttcattttgcggatattcaagtgtcgtaatggatgggaatgtccaatccactgcttccggcagtctatcgggcggtgtattctccagtttctgctgtatgttttttacggtttcctgtttaatcatccgccggccgcctatcggcagtacgagcaatacttgatactcgtcagccagctcggcaaaaatgccttcgctctccaaaatattttgtaatgaatagccggaatgtccgagctttgagcgaagaatgagttttaacgggtccgctttgatcccatatccggagggctcgattacttcaatagaagaaattgatgcgaagttccgttttatttgctcaatgtgcgctatatgaacagggagtgttcctttttcagcgatatcctgtatataagcgcgcgccgtatctaaagatgccataatcggatatgacgggctgctgctttgcaaactgcttagataataggttaatcgatctctgtcaatccggctgctgtttaaatgaaagtaagatcccatcgtcatagccggaagcgttttgtgagccgattgaacaactgcatccgcccccatagccaatgatgaaggcgggaacggttcacccaacacaaagtgagcaccatgagcctcgtctaccagtacagggacgccgtatgaatgagcttttttaactgccgcattcaaatcggcagcatgcccgtagtaagtcgggttggtcagaacaaggcctttcgcattcggatatgacgctaacgctttttcgatgactgaaagggatacataggaaggcacatgcatatttttatcaatttccggtgccaaatacaccggcttggctccggccattgccaccgcatgaaaaacagatttgtgacaattacgctgaatcaggatgggttcgtccggttcacaaacagccaaaatcatcgccaggttgccggcagtcgttccattgacgagaaagaagctttcctgagagccgtaaagcctgctcaccaaatcttgtgcttctttgatgactcccgttgggtgatgcaagtcatcaagccccgtgatctcagtcatatcaatagataaaagagattgatatacagatttggcttcatcaaaaaagacatctccattgtgatgtcccggaacatgaaaagaatacgtatttcggtgcgcatgcttcagcagcgctgtatataaaggtgtgtccatttttaaacaaatcctttgcctgtctttcttattatatcgtgcctgtgagccaacttaaagctaagactttttgccagctagacgtcatcacggccgagcgtcatattaagcagcttctttttcaagtcgccttccatgataacaagctcctcttcggcacgtttgcgtttcatcctgccgtcttcttgaatagacatgatttcttcaagtgtgctgactaagctttcctgcacttttttgagggtatctgcctcaacaaggcctcgctcattagctttggctgtctcgactgtacttgttttcagaagttcagcgtttttcagcagcaattgatttgtcgtatcagccgccttctgctgcgcatctgccgcactccgctgcctcataagcgtcagcgcgatcgcaacttgattcttccataatggaatagccgtaacaatggaggactgaattttttccgccagtgcctgattcgtgttttgaatcaaacggatttgcggcgcactctgaagcgtaatctgcctgctcagaagcagatcatgcactctcttatccagacggtcggcaaactggcgaagatcattcacttcctgcgcggccatttgattgtgttcccgtgattcggcttttcttgccgcttcgggaatcagctttgttttcagctcatctaactttaattcacccgccgctatatacagatttaagtcagagaagtattgtttattttgggcgtacagttgatctaacagtttattgtcactcaacagcacatttttagaatgctcgagccttctgctgatacgctcaatctgcacacttgtcttttgatatttcgaaagcacttcctgcacagaaccagatacccttttaaacaaacgggcgaaaaatcctttattcttcatctgcagatcatcagggtttacctggtcaagcttcctcatcagatcagcaagtatctgtcccatctctcccgcatcttttctttgaacatgctctatcatcgtgtgggaaaattccagcagattcgtttgcgcctgcgaaccaaacagaacaatgctttgcatgttctcatggtccagtttttcagcgagctgacgtgcagcttttcttttttcttccggcagcgtatctgcaagctttggattagcctgatcattttgaacatccatatcatcggaacggtctttggccatttccttccccctatcttattttctcaatgaatgctttgccatatctaattcaaagtgcagatcgtcgatgtcttctttcatcagttcatgaaggtcctcttccagccttctggaaagctccgcaagagtcatcctcgtctcactcaaggacattgataaatctttatttttccgcggctgtgatgagagcagaacatacttttccgttagttccgcaacggaatctagcgtttggtaatagaatcgctctgcctggtaaaagcgcttcggctcttgctttgtaagcacatatattcgccgcgttatccgcagtatctctgcattctgcttcagcatttgtatacttctagagcgaaaaagcgctctccgtaatcggatgattttatctctagcttcctcaagattttccttgatataagcatattcttttcttgtcagccggtgtttctttaaaaagagacgcttcgcattccaaagcccggccgcaccgactgccgctccgccggctgccccatataatagcgaatagagaaaaggctgatgccctatcgtaaagacggctatccccgctaatacaaaaaccgcgctgccgcaaagcgtccatttcatatattgaataaacggtttcatactcggatcgactcctatttattcacttttatcagtattatctattacattctatttctaaacaagttcctcttcttatcgtatcagttctttaataaaaagtgaaaaaactcctctgtttttaagcaaaaaaaagacccttttcagggttaagaatataacgtcggtgtatgaagggctttcagtttgcgaacgaaaaactcataattcggatcagaggttgaagtggaaactactttcttctcacactctaaacatataaatttcgtataaatatggatacccctgctttttttggtttcacacacaatgcatgtttcttcatggctggacgtttcattcatttttgcccacctccgtatgaatagccttcccctaagctgttgattgtatacacaatttggacctttttgaaggttgcaattagtatatgggcatcgtcgtatttcggtgtttgtattgtttttattcaatatttgtgtccgggcaggcaacgggccgccctggctgcagctgaaggagatccgcggccgtcggttccgatgcggcgccggcaggagagcatctgaaggcgaaaacgccccgcgtttacggagcgatcagggctgcatcagcagcgcgccgcgccgtgaaatctccgcggctcattgaagctgcggggcagccggattccggagccggccaggcgctggctttttgtgggcagggcaggcaacgggccgccctggctgcggctgaaggagatccgctcagacctgcaactgcatcagcacatggcgcgttgcttagagcgaagagagaaaaagcgcgccgcgcttaccatggtgctccggagccgctgtagctgcaggtgatccagagccgatagaaaggaaccgactcttttcaccaaataagaaaagacggctgcttcagcaatccgtctttttcgttattatttattttagtgaagtctaatagcatatttacatcaaagtcgaaatgtaaacttaaattattcgtaatgttttaagcttgcttcaatagatttaatgttactggttaattttcgaatttgtcttcggagagtatcattaacaacagtaggaatattaccttcttgtttatttatgaagctttgaacaacctccttttcttcaactgattgtttcaattcagactttagttcgtttattctttctttcatgagttcttttgttttttcatccattttaaaatgctccttctttaaataattgatttaacaatcaaactttttaaagctacaccgcctttttttcatccatttttgattactttattgtaaataagactctagtgccgtctgggtaaccagaaagcttatgtgatacccaggaacctgctccgcggttatcagaaggggttatgtattcgatgtctgctccgcttcctccttcagcgcaaaaagccattggccattcatcacgatcatatcctttttttgttgggatatctttcaatgattgagatcgattattttccgctccatcacggtcgatagtacacacagctgatttgcccttggaaattgcattttctatatgtttggcagtctcagggtatttatcagccggaaaataaattaccttgtcggctttcttatttgaattgttgtttttgtctgaagaaacatcgatagctttatcatgggtgaattcagaaataagacggtttatatcctttatgattggacgaataggtgtatttgggacaaagttgcccaaggcataaaggctaattataacggctcctaataaccctagaaattttttcatctttcccgctcctcataagggatttttataagcatttaaagctgctttgctaatctcactcaggtttcttgtaataaaacttggagctatcagagattaaggtgttacttactctacggattgtttccgaatttctttgaaatttattaaaaggggtattgtcgattttatacttttttctcaattctttaatcttaccggcgattataaaaaggtcatcttccttcaaatttgcaatatcacataatatttcgagatatagtttttcggtcatttttaatttcaccatcctgctcgtcattttgttttatcaacaaaatcaaaaatgctttgatcaagaggcttttccccttgcccttgaaacagccaattttttgtttcgcggttatattcccaaccagctttttttaaagccgcgcttaattgctctaagttaatgcttggtatctttttagcaatgcttgctaatgttatacctggttgtctggttgcggagagaacttcacgtaaggttgggttttcacctatattgattgaatttagttcactcaactctttatgccatttctttatatccgatctgtcgaacccttcctgggttagagtagaagggatttcattagggttatccaaataatattgcaactgttttaatgcttcaggtaggggaccgaaactgtgtattgttttgtgtctttgccctttccctgggactgtcacgccttttttaatgtacacataaattttcccttgtttttttaatttgactaagaagccgctctttttaaagtctgtcggagtggcgttactcttcgaagcatatctatgatttactttgtttctgtcaattttgtctttctgtaaataagcttctaaatcagactttaggtaacgatccgcaatagcttggatttctcccttatgcactctgttataaaatgtcacatgagaaatgttcatgtattccgcagccgctttgggatcaaggagttgctcggagagataatttcttattttctgttctttttccttatcagaaatgggttcatttgcgatttttattatctcgtacatagtaaacctccacattgtttgggtattgtttctctaattttccgtcctaaaccctaataatatcctcttattccgaatgttgaaagttccaaagggaggatgcgggcaagacataagagagaacttcccttgtgttaagtataacatatgctatagtaattgtatagcatatgttatacaaaattagtgaaggttcgacattgcttttgaaatttccttatcagttgcacgtataacggattcaacaaacttttcacaatgtctttcgtccgaaaaagaacggctatcgaagtttatatttaacgtatatgaaaactgtttttgatttaccttgtaaatcagagttgttacacattcataattacaaatatctttggtcttatcatattccagatccatatcatcgtactgagatttaatacattcgtccgcagtgtgaatctgccgctcctttatatactcacaagcaatagcttctatgacatgatgtatagtccgtttggcagctgaaagataaaggtcacagtgaacggatgggtttttaacggttgttataaaagttgggtgagcatgcgtttgagccgctatttctgagtggatgatatccttgaattcagtttctgctatgcctgcaacttcatccaatgtaaggaaatcaagcgtttgagaatggtcactattgtttaaaaacatattcttattttttctcacctcgatgctgagtgaagctaacgcataatagcgcatctgctgctgaacacgatcacctagacatgccataattttttctttgtttgcttgagtggcaggcaaaccattgctttctaatactgccgacaggtcttctgctttaagttttgttaataacataagaaccgctccttattttcgattatggagagcattcacgcggggaatgaaccacgcgtgaatgcaactaagcattaattattaataatggtgccgcaaaatatatgaattcgattattggtatgctggatcattctgacttggacatcctcttgtttagagatcgaaaggtttttagctttcttaaagacgcttgcaatgctaattgggctttcgattgtttcctccaattgatcttttacaaacaaatttgcttcgaaaactcttgttttcatctgaaccgctccttttcaaatttattgtgtgaatgtcaccatcacctgatgacaatttaagtataacatatgctttactgatagtaaagcatatgttagaaatgtttatttatctttttgatataacgtgtaaccgcatctgcaaaactcagctatttgttcaggtgacaacccgattgtttcgccctgatcgttgactgatgcgacaaaaaatgggccgtggatacaatgtgtcttaccgttttcagtaattttgcaatagtattgggaattgtagaagccctcttcgtcgaaccaaatgtcaatgttattattgagtctcaaacattcgaggttatcggctcctacaagattttgccgttcttcaagggtttgcggcagttcaacaaatctgttgttctgatgatcaaacaaaatgattttttccatgaaactacttcctttcaaattttattgtgtgaatgtcaccatcacctgatgacaactttattataacatatgctttaccgatagtaaagcatatgttataaattattttttgaaatttccatccggcactctcagctgacagataacatggtttacgaattcttggaaagtaccttcgctacttagatcatgaccttttatgttagtcataacggcgtaccattttccgctcttagggaaataaacattgttaatcatattaaaaggatcgtcattcttttcaaagttttttcctaacatttgagaaggttttacaaaggatacattacattcttcgtccacatacttattaatcgagttaaagtatctttttgcgatgactttaatcaggtaacaaatagtttctgccgtttcaaaaaaagggggttccgttatggaatcgaattgcatctcagaaagaaattctatagttgcagtgaaagaaaaactgcctttagttctctcttccgctatttcagtgaactcattaagagtaatcaacttcgctctcttccgatacacatcatcagaagtaaaagctattttgttatcctcgatgtgattcagcaaagtttcaaaggcatcgtgccgaatcgtttcttgaatttctactgtgtccaactcttgaaagatcaatcttatgttttccttagttgccggtatgttgtttctttgaagagcttcaataaaatccgcttgtgccagtgtgacctgaaacgtaaaattcattttaattctcctttacaaaatttattgtgtgaatgtcaccatcacctgatgacaatttaagtataacatatgctttattcaaagtaaagcatatgttatacattttttcttttgataaaatcattccttttctttataatgaaattaatgattttgtaaggactttacctccttaacaaatttattgtgtgaataggttgcggtgtgcggaaacatgccgcaactcttttctattatatgctttactataattaaagaatatgttagaatttaattaccgtcagttgatggttttcacacaataaatcttttggaggggttaaattgttaccacatatcaggaaaatgagtcttgttcatgattatctttataataatcgtgaagtagctgaaagatcgaatgatgggaaggatcaagtgagagaccgttttatcattgttactacagaagaggatctctttgctgaagaaatacccgctgaagaacattatctatattcagattttaatgaagtggtaagtgaactgcgaaacacggtaaatgatatgaaagctttaagggaattttagaatattttttctaacatatgctttactatcgttaaagcatatgttatacttgaattgtcatcaggtgatggtggcattcacacaataaaatttgaaaaggagagtttttatgggaaaaatattgattgcagatttgtttattaaggagaacaaaaagcatttatgcgcgttgggaactccggaagacattaatgttgtttttgacaaagcttatcaactccgaaaggaacataaatgtgcaatagacgttaggattgttcggcttagtggggtaacaacagacaaggtatctatcagtattgaagaagacagttttaattacgatttccataacgagttagatatttgagaagagggcgaaagccctcctcattcaaaaaatattaaattgtacggaggacttcaatgaaggatataagagagattttactcgagagattggtattattggaacgcagttcattatcattaaatgaggtggaattcgcaagcatagttaatgctgaacctgttgttcactatgcgaaaaaaactgttccggtttggacaagagagatacatcatatgctctatcgaggatatatctggggagctgggatgtttatgcgtgtcatgcgtgaagaattagggaaactcggtcttgatgttgaggattggaatatagaatggcaaaacgctttcaacttaatgaaattacaccgaatagaattcagggatttcttacatgaagattttaaaggaacctacgaatggacacatgaatttgccctatatttaaatacaagattgaacgaatatgaaaagcacggtgaactagataatgtatcgagtatagaaaagaactacttagaaggcatcatgggaggtaaagcggtatatgaaaggtttttctacgataaagaatatttagacgccctatgcggtaagaatgcagtttgtaaggcatggaaagaagtgtggaagattaggaagaacccagcttaaatttttaaaaaaaatgtataacatatgctttactatcggtaaagcatatgttatacttaaattgtcatcaggtgatggtggcattcacacaataaaatttgaagggatgaagaaaatggagaaagtgattgaagttcttactctgaaacaggtaaaacatgaggttgactgtccagtatcagtcataagaaggcctgacgacgcttttaaggtctatgaacactttatagcagatgaagcaagagaggtgccattggctatctatcttgacgttaaaaacaacattcgtgccatatataaagtatcgataggggatgttcgcagtgctatcctcgctccaagacaaatttatcaggcggcacttttaaataatgcttcgtcagtaatcattggacataatcatccaggcggtgatgttactccttcaaggcaagatattgaaaccactcagaggatatatgaagcaggaaagctaatagggatagatcttttagatcacattatagtgagcattgaaaatggagaaaagaaacatctttctttgaaagaggcaggatatattaggaattaaaagaaaaaaattttgaccaacaggttcacaaagtaaaccgaaagtgtttactttgtgaactatatagtgtaaaattaaggtaaagaaggaggcagtaatatgaaaaaatctcaacaatttctgaaaggaacttttccttacttgggtcatcctgattatgatgggaagccaactaatgatacgctcgaaacctttgatcagttgttttcacatttccaagaccatcacaagaacggctttgacctcagacggctgggcaacctggagccatcgcttatgttacttgcagtggaagccattgcgattttctacaaagaggatctgtacagagaaaaggaacctgatacggaatatatcaaccttacagataccgctaagttgcttggcatttcaaaacaaactttacgtaagcgaatggaaaaacaaagtccgccagtaccaaaaccagatcactatgtgagcggtgtaccggcgtgggaaaagaaagctgtagaacagttcatatgggacaacggtctttatgataatgatggaaaatttacttaccctgttcgtgaagaagactagaaaaggagagaaataattatgaaaaaaaatcttgccacattattggaagagcggaagcgatcacagtctcagttggataaaaacgaagtgatactaattaaggatgcaatagaagagttttctcacagagaagagtttgaaccagctttctatttacagcgatttttgagctaccatgaactatcctcacggtgggggtggctgcttgttgagaaatttcttgcatatgtgagaagagaagaaaaaaagctgtctgctttccgttaatttaatgatgccgacacaattgaaggaggctttgacaatgaaaatgttcggctatgtaaggggtctgtatgatttggaaagaatggcggaattgtatgggtggcagatcaacacaacggatcatcataataaggggtcagactttgtttatctttttcatgaggaacgggattttttagtagcggtaaatacgtttaatggtcgattctttgttacacatcgattaacgaaaaaccttgtggctacggatcaaagtgtcaaattaaaaagtgaaaaatggtatgaggatttgctcagaatcctttataaagaggttccatgccgtttcttaaataaaaaagagttcagccgccagctgaaccctcttgaaaccttaaaagcttctcacgctaaaaaagatttcatgtaaattatagcacagatccgtttattcctgtatgggaggtgcacgaatgacagccgctgaagtcgcggtgatattaggaattttcctgacatctctgcacatctgtgaaaagcttctcacgctagaaaagatgttaatagaaagaaagtcaccaaagaaaaaaaatcctcggaaagcaagccgcaatagtaagcgtaagtttggataggggagagggtgcctctccccgccatatacgggttgtcaaatgatatgaaattactcaagaccataaaagagattgttttctggctgttcatctttacttatgtctttggtatccgtacagcggttagcggcggtgttcaaaaagctttagacatattgatcattattgctgttgtttgttcgttaattgtactttggacaaaaagtagacaagcctaagcgggcttgtcttgaattaaaggagcagataatgtgaaaaaatttgccggtgtaagatcattggacgatatgagaacacaagcgattgaagcaggatggaaatttgatgagaaggcttatcataaggagaacagtgactatgtattcctttatgataaaacaaaagatgacattgtggttgctatcaatacattcaatggccatttctttgtttacaataatgcaactgatgaaaatatagctacgcatttaagtgagcgatttgatcaagaatcttggtacgttgaaattttgaatattgttaataagccgtacgtgaaaacagagcggctttaattcactcagcacatgcagcaggcgcagcaggtctgcgctttcttcacaaatgatacaacattgaacatttttcgttttgaaccggtttaaattttatcggtgagaggtgtttggaattgcagtatccaggagattacgtaacgattgtaaaaaagccttctaataggtatgaccaaggtctcttcgagatccgtggtatacccaataccttctttgaattttcatatcttggagacagaggttttatagaaattaaagagagcggtacagcgatgcactgtgtcaaccggaatgttaaagaggggaagcctgtttcatataactttagcaagaaaaatattgcatatctcagagagcagataagatatctgctggacagacgattatactaaaatatgtggtttataattgatgaataggagtgttaaatgtgtatggcggtagcctaaacgatatagaagcgaatttagagcggcttttagaagctgaagagaaatcattgtcttggagcatttcgtttatgtgtgaggaaggaatagaattagaatcagtaggaagtgtgtattatagcgggaacagcttttataatgccgaggatgcttatcaatatttaaaagaaaaaaaccttctttcagagttttcgcttagccagcaagaaaaaatcatagatcggattaaagcatttgtgaatttgcagatttctgaaaacccaaattactgcagccattcagggtacaaagcttctcctgaatgttatagggaaacggaaaataaaataatggtagcttttatagatgattcagaccaactctattttgatgctattatagacaaaatctgtggcaatgtgaggtttgagtatctggggcaatacgagacagagggaagccgcccttttgaaaacagatcgtttaagataagtgtagaaagtattagggggaaataatatgaaaagtacaggtgttgttcgcaaagttgacgaattagggcgcgttgttttaccgattgagattagaaggatatttgatatgaaacataaagatccagtagaaattttcactgagaatgatacgataattcttagaaaataccaaccgcagaaacagtgtgcgatcacgggcacagtgtcagatgaaaatatgacctttagcggagggattgttctgagtccagaaggatgcgagaggttagtgtctgaattaatagaattagggcgccgataggggtattaaaactcttctgtgtaaagggttaactaaggagatgcgggtattatgacaatggaacgttacttaaaattaagatataaaggaaataccgtgcaagaaattcaaaatgaatatgaattaagcgaaagcaccgtttggacccttgaattaggttatacttgttttctcaaagggattccgctagatgaagcgattaaagctatttttagcattgagagcccacaagttcattaatacggcgccagctagcaatctgaaggcgaaaaacgcttcgcgtttacggagcgatcgggagagcgctggctgcgcctctcctataaaatctccgcgactcatcacaagctgcgggagcaaccggattccggagccggccaggcgctggcttttttgtggccaggtcaggcaacggatcgccctggctgctgaaagagatacgcggccgccggtcccgatatggcgcctgcaggagagcatagaaggcgaaaacgccccgcgtttacgaagcgattgggaaagcactggcagcgccgcgccgtgaaatctccgcggttcatcgaagctgcgggggcagccggattcgggagccggccgggtgccggcttttttgtgtccaggcaggaaacgggccgccctggctgctgaaggagatccgcggctgtcggttccgatgcggcgccggcaggagagcatctaaggcgagaacgccccgcgtttacgaagcgatcgggagtgtagcggcagcgccgcgtcgtgaaatctccgcgtctcatcgaagctgcgggcaaccggattcgggaaccgcccaggcgccggctttttgtgttctggccaggacgggatgccctggctgctgaaggagatacgcggccgtcggttccgatgcggcgccggcaggagagcatagaaggcgaaaacgccccgcgtttacggggcgatcaggaatgcaccggcagcgccgcgccatgctccgcgtctcatcgaagctgcggaggaaaccggattcgggagccggccaggtgccggcttttttgtgtccagagcaggaaacgggccgccctggctgctgaaggagatccgcggccgccggtcccgatatggcgccagcaggagagcatagaaggcgaaaacgccccgcgtttacgaagcgatcgggagtgtaccggaagcgccgcgtcgtgaaatctccgcgagctcatcgaagctgcgggcaaccggattcgggaatcgcccaggcgccggcttttttgtggccaggtcaggcaacggatcgccctagctgctgaaggagatacgcggccgccggtcccgatatggcgccagcaggagagcatctgaaggcgaaaacgccctgcgtttacggaaggaaccccaccaaaaaggtggggctagatatgcaatttcttaacattttttatgttatctgtgttatagtgaagttgctatcacgccacagcattattcaaatatgttgtgtgttcgtcatgggataattcccacctatattagccgttggtgggggagaaaatcgaaagtgaattgtgcatgtggttaataattgatatctgttcttgtgatagcgaaccagatacaatattaaccgatctaaaaaggaggagtggaacatttaaacctgggaatttaaatgttctaacagatggctccttgattaaatttttcgcgaatagtttaatcatctccaatggaaagactcctggcgtgggaaccaggagttttttctgtatatctgaacattttttagggaatacaatataatgcacaataaaaggggaaacagtgtgggatttggctgcggttgtgtttaagggtaatctccttgcgtttctgggaaaaacgcaaaccaaaaactgtttccctcttgcaattacttatgggccaaaaactactgtgattgggtgatcacagcaagcaacaagcagtttagatgttcattctttccaaaacctataaaagagcaaacaaacgtttcctatcttgatcagccaatctaggtgttgtttgattttattttggttcttcctgaatgagttaattaaatttttcgcaaattttttcacgctaatcatctccacggttttattcacaaccgcaggattatggatattataccagttatttctgtttagggggagagaccaggtttaagatgcctggtctatttcttgttgtgtttatgctaggatatctgggatcaaccaaactataaaaggtagtggctggttaacggtaggatgttgtattgacacattgaatgaacacgatttttcgttcaaatgacttgttaatttcatggggttccgagaccttgtttgtctttttggtatcattagcatcagaaaatttggatatattgttgtgttttgtattattttagggtaactttgaactgtaaagaaaacacaaaatagggagtgatgtcatggggaaatagaaaaatctattctattgagccgtagataggttttattccagaaaagtgtgtttccttaaatttcgcttgcttcgcgcttctatatatctagttctccatttctccatattagtgcgtgcataattgctctgcctctcagaaataaatcctcatatatttaaatcctccatagaaaaggattttcaagacaatatgttaatagagccataaaattggcggaaatcttctcatttccatagggcgtttctctttgaaaaatgagaagatcgaagcgaaacatcttattttggattataggctcattcatcattgaaacttcactcactatcattcttaattgaaaggggtacaaacctacatgaaattgaatttgaaatactggtcgatggcgattgttctatgtttcactctttttggtttcttaggagcaactaagatacaggcagctgaagtaaaaacagaggcgcaaaatattggccttgatgctaaaaaagaggaattagcatctcaaatcaaaatctatgatgaaaacgatgatgaaattcacccttacacgttacaagaattgaaagatatgattacgcttgatgatcaaaatcaagataatccaatccatgcattgtataagacatatacaagcaaaccatttggcttcaagtataacttttcaatagggggaggaacgtatggaaaagcgttcaaaaacccaataacgcttttaatcacaccacaagggactgccaaaaagttctctgtagctgcgaagtacgataatggcaaaggcggtgtaggcggaacagcaggtaaaatttctcttccaggcgggtggacaggtcaaattcatatgaactggactcagttgaaaagagggaaaagttatcactttaacttcattaataacagcagcagtgatgttgaagttaaaatgaagaaagttattgtatggtatgattgattaacaggcaggtctgaaaaggcctgctctttttgtgaagttgaacagaaaaaagaaacccggtcagccttatcgggtttcggaacatactcttattcgtttatggtctttaaatactcttgatgttccttttctaagacttgaacatcttctttgaaaatttcgattttgtaattttctttaatttcatcagacaagttttcatttagatactcccgcagttttgcttcactttttgttttatccattccaattgaaataacgggatctgtttctccaataccataactaaataatccgaattttccccatgcatcatctaatacttcctccggtggtttttgcttcggacttgttgcatgtaaagcaatactaaacatgaataaagaagaggctatgattaagactacagttaacttctttttcatctcatccctcctttttttccttgctattaatatcctaatagcttagctaaaagtatatcacgaatcataatgaagaaataccgagtttcttcctatataaagtacttaatgataacactatctttcaggttctaatctaagcttttctatatagaaaggaaaatccgcggccatcggcctcgatacggcgtcagcaggagagcatctgaaggagaaaacgccccgtgtttacggggcgatcagggctgcaccggcaacgccgtatcgtgaaatctccgcggatcatcgaagttgcggggcatccggattccggaaccgaccaggtgctggcttttttgtggccagcgggcaatgggacgccctggctgaagctgaaggagatccgcggccgtcggctccgatacggcgccagcaggagagcatctgaaggagaaaacgccccgcgtttatggggcgatcgggagagccatcagtagcgcgccgcgctgtgaactctccgtggctcatcgaagctgcgggggctgccggattccggagccgaccaggcgccggctttttgtgttctgaccaggacggaatgccctggctgcaactgaaggagatccccggccgtcgttctgatcggcaccggcagaaagagcatctgcaggagaaaacgccccgcgtttacggggcgatcgggagagcatctgcagcgcgccatgaaatctctgcggctcatcgaagctgcgggggctgccggattccggagccgaccaggcgccggctttttgtgttctggccaggacggaacgccctggctgcagctgaaggagatccgcggccgtcgttctaatcggcaccggcagaaaaaacatctgcaggagaaaacgccccgcgtttacggggcgatcgggagagcatctgcagcgcgccgcgccatgaaatctctgcggctcatcgaagctgcgggggctgccggattccggagccgaccaggcgctggctttttgtgtccagggcaagctacgggacgccctggcagctgaaggagatttaagaccgttggtccgatcggcgccagcaggagaacgtctgaaggagaaaacgccccgcgttacggggcggtcgggagagcaccggcagcgccgcgccatgaaatctccgcggctcattgaagctgcggggcatccggattccggaaccggccggtcgccggcaagtttctaaaagcaaaggtaactggtgtcgttagcaagcatgctctcatcggtgggggttatgaatagaagttgaaaggatactacaaagtgataaaaagtatcaagtaccatttaattaatttgaaatcattactcaggggtttacagggcgaattggagtgtagacgcctggtattgcggcgaagttccgaggaatatcatgtgaaagagtatcaagtaccatttgagtttttgataaaaaaacgaatttctgttataataaaataacagaacaaattagttaaacgaaaaaaagagagacgttcaaggaacttggctgcagcttttaccctccattaaacctggtccgtttaatgtaagcctgttcttgaaagaccctctattcctaatttttataaaatttctttaaggaagcagaaaattaataagaagagtctgcctagaacgacaaaccattctaaggtcttcttgattttctcgcttcttttttttatgtatgaaaagaattttttcactggcctcccccctttactgcttgatcagctgcgggatactttaattatagcatagttggtttctttgactgttgtttgggaaattaatgggttcacttgtaagtccatgcccagcacggttctatgtttttgttgctgtacagggagaacgactcttggagcagtttttaattagcctctctaccgtctactttatttctcataaataaacgaggtggaatcgatgaatggtatagaatttttagaatctgtggcgcaccttggacaattagttttagtgttctctggctacgccctctattggaaactaggtaaaacaaaaagggagcgaaggcttacaaaatttgaaacctccattaggttctctgtaatgttcggtatatctgcatgggcgctttcgtctcttgctttaaatttgtggtcataatcttccgttgatatttgaattaataaagaaaaggcatctctataatgagatgctttttctttattcaaaagaaattccataatgtatgcttttacataaaagcatacattataattgttgaaaacactgagtttttttcattagtgtgttataatctatacaagtgaaaaaagcatacatttttttcgttgattttaaagggtttagatcaagcggaagacagaaacggatgtagtcaatatcactggttgggaaaatgaaataattacattatcaggaaactggggaggggataatcaattgaaccgataaggatttaaatatgggagttgattagatgctaaagtgtaaaaatgctcgaattcatgaatttaggcttcaagctgttcataaaacaccagtcctgtttgttatagaagatttcatgcaaaaatttactcttatcgctatcccacagtgggattggtcctttcagatgacgcatacagttccacgtgatctgaatataaaacagttacagcagtcattatcagttgccggctttattaattacgatgaatctggcttcgctgcaaatacaatatctgatatcgtatttaatgaaataccggtaaaagccgaatatattgaatagaaggaatttgcaatgaatcagttacaagatgttcagccaatacgcagtttagaaaaaatagaagacatgaagtgggccttgaagagattttgttctgaaagagactacatgtattttttgattgggattaactgtggtcttcgtggcggtgatttagttcagttgaaacagtctcagtgcaggagaaagaagtttcctgtaaaggaagggaaaactaagaaaaaaagaaatattaacctgtcagcaatatacgatgaagtagctgcttatattgataagtatccgaatgagtggatgtttccatctcaaaagggaggacatattacaagaattcaggcttaccgaatcttacggagagctgctgacatggctggaatagaaggaatgggcactcacacccttagaaaaagctttggttattggcattacaagcaatttagggatgtagccaaactccaaagtatctttaatcataataatccagaaacgacattgagatatataggaataacagaagaagaaattgatcaagatcttgaaaatttcaaattgtgatctgatcaaaagagttaaaaaaacagccctcttgggttttatggcaggcaatgggcgatttcattcggcccctcatgacattggctgacttgtccgtcaacgggtagaatggatacaaaaaggaaaggcggagaatacatggcatatcgtattgtgggcgagttggaagggacggaaattacgttcacgagtacacacccagacagagagaaacgagaggagacattcgagacgattgaggaagctgaggaagctatgaagacctttaaaatgtctctgcctgaaggaacaaaattgacgattgaacctgcggtgtagaggcaaatgattgattttgaaacggctatgagacacgtgagagcaactcttggctttgaaggtttagtgctgacggaagaagaggaagagcttttagaaagacggtttcatggagaaatcacagaggaagaatacatacgaaaagcattggaactgtcttactccggtgactaataaatagggcagcgagcaattttggtgtgagtcaacggttactggaccgtagagaggattgaggatagaaggagaaaatggaaaatcagatcgtgaaatttgtttattgggagttggtgtagtcggtggaagttctacaaggtcgagaaatgccggatgctaagtattgggatgaaaaagaacaagtttacaaaccagtattagctgttgattttactccggaattaagaaaagtaaaaactgtatgtaaatactgtgagcaaagtgttatcttcgtacagggtaataagaaagaggattctaaaccattttttaggagatctccaggtgtatatcacgttgagggctgcccgtatggacagaagaaaactctaaaggatgaattgagggaagtgggtactttggaagggctactgtatggtgtaaagccgccccttgctgttcaaagggtgaaaaattcatctgtccaagaaggcgaaaaaagccaatctgaagaaagaccaagatcattggagaaacagcctcgtcagcaggtgccgaataaagataaaccgcatcagaggaatttatttggtgtagatgatttatttcatgaattaaaggatataagaagtcaagagccttcattaatgaggaaactatatgaaagaatcattgggaatgtatattacccttataaagagtattctctcctgttggaacatagcaagaaaggaaagctaaggaaatacttttacaccgctggaatattcaaagcaaaactggaatacgacatgattgagaataaaggatacatctttttgtatggaaagggtaatggctcaattaaactacgcctttatcctggagatgaaaaggtaatgacacaattaaaaaggttcagatacaaggtagcgaggaaagaaaaaaagaaaactgaatttattggagtcttagttcaattaaggcagataagtaatgaagaaggagttacatatatagatcttgatttatacgacttctctataaatcactatatgaatagttagaaacttttacggcgggaaaatgcgccgttttttgtttggattccaaaattttcttcgtttttcattgggtttttaatacttttggaataaaattagactaagtaattagcaggaggaacaatggatgttacgaaatgacctcgtttttaaagagctaacgattttgcgactccaagaattttacgagaaaaccggtagatcaccaaaaaagaaagatattgaaggcataacaagaattgagtctgcttttgggagttggactgaagctctcattgaagctggttttttccggaggagaagaataactgaacagcaaaaattagatattaaaagaatggttaatgaaattaatgaatctcataaaatacgattaaaaaagaacataacgcccccacctgaactggacaccatggtattagccttggctacagttaagatattgaaggcgtcacctaacgaattattcacgagaaagaagataaattccctcttaattgattgcgttggttcaggccccagccagattactcacatctttccggttatgaacgaaattgattatagggtactgaatccaaggaaagggtgttatgtcttttatccagctgtaaaaggaggggatggaagtgtttaatgaaagaacagcattgaaaatgcgaatggagcagcttaatgagagagagcatataattatacgtgaatttcaggctgagcgagacactatttataaacggctccgcgaacttgataatggtaagcatgcattgccatgcctacgtgagttagcaaaacaagaaaaatttataaatgatgcatataaaagtggagaaattatcgttccccatgtcagcgccgcccgatcagaaaattctgttgtaaaaaaaatagatcagcgaaaacttgcgatacagtttcttgcttctcaaattggtaaagaagtgaaaagcgttgacataaaaaggtatgttgaaaggattcacggtgaaccaattcaaaacatgaccatgtttatggaaagcttgatgagaaagaatccaagactgaaaaagattggtcgaggattatatacgtacgccgggattggagaataggcagagagcgaaatccaattctggcttcagggagattgcccgatattgaaggagcgcaaggtgactgatgttatcatcactccacacaaccaataaatttggcattacagtaaggatcgcgagcactaaaaatttttcaacagagaccgcttcaagaaattaagtagttacacccttgtatggaatttccacctgatttattgttggtatgagttaatttactctatagggggtagtgcatggtacgcagaggaatcgtgttccttttcatgataatggtacttttaataacagcatgtagttctcaatccagttcgaatgtggggtattgggttttagaaaagaatagagttaatgaagatcacgatgttaaagagtatgtttcatatcttcaagagcataaagacattaggggatataaagaattcaccatagcagaaggaatgcagatggtagtggtttctttagggaacagcgataaggaaaagcgacttgatgttgctcatgtcaaaaattcaaatggagacataaaattaactgttgatgtacaaaagaatgaatcaaataaaacaaatgagaaaaacccttatgtcatgattggcctaaataataaggaagatcataaattaagcgtgaccgatcaaaaagggaataagtttaaagaggttgattacaaataaaaaaatctggcgagaagcagttttttcactgtttccagcttttatgaccagtggccaggtaatgggtgtcctggcaaagaacctgtgaccgtcggctccgatgcggcgccggcaggaagatcatcagcgcagaaggcggaaatggccataaagcaagatttcatacttatgtggagactgttccttacaaaatattcattgacggaggattagccagtaattacggcggggaaggcggccgcgcttttaagtcatttttgttaggggtgggaattccggaagaagaagtttcttttgtgacaaggtataacggtgaagaaatagcagtgattgagatagtcttataggcatctgaacaagcgagaaaataaaagaatggtgttgcataaaactggaacggggggggttcttatggaaataatcgttagggataacaagaccgtgtctaagaaaaaaagctggtacaatcgttttgaatggattcttttgaatacttcgcttttcttcatctggttatggttagtatttacgttatttctcaacatgaattacatgattaaattttttgcggagttgaatggttttattggcctgagcgtgtttttaggaggtcccttactgatttggtatgatcacagagaagaaggtcatctaagagctttgggcgcttatatccattcgaatattctcagtaattctgctgctgccagcattattactctattagcagttaatcttttctttgcttataattcaatctcggtccttatagaatggtgtgggcgttaaaaaggttgccgtaattgaaatagcttttataataaacaaaaaagcagccgcaggaagacggctgctttttgattgtttgtagacatgtagacgtgtctactttttatcgttaaatggttactgctttttcagctacttgaattggtttgttagtaaaggttgtatctttcactaagggctgcgcagcagccagtaataaagccgaaacagttagcaggaaacgccctgtgtctacggagcgatcaggaatgcgtcggctacgcctcttccatgaattctccccggactatcgcagactgcgggtagcaggattccggaaccggctaagtgccggtttttttgtggccagggcaggcaacgggccgccctggctgcagccaaaggaattgtgcggccgttagccccgatggggagccgatatgagagtgtccatgctgaggcgaaaaagctctgagtttagggagccaatcaggagtgcaccagctcctacgacttccgtagattatttttagaatcactattttttattttctctaattcttctatagtgtatgtagtaacaggcgcagcttgatcaccatctttatccctccaccctttccacactcgttgattgtaattatcttttcttttttgttcccattttttttgttccttgctagtacccgttgtatacttacccttttgtgcgaatctttttcttgctttttcgctactcgtgctaagtgttggtcttacattattcatcgaattcagttcttcctgtctaaatctcatctttttctctatagcttcaggagacttcgctctggcccgttgtttttctctaatctctctcctttttctttgactcggcgtttcattttttatttgattttcttctttcattttaaaccagccccttctaccaggatatttatgcaaaacttcaatcatttttattataaacaaatgatatctttctctcacttatatcttgccgttggtcctgatatggtgccagcaggaagaacttctgcacagaaagccaaaacacccccgcgtttacggggggtgatcatgagtgaactggctatggctccatcgcaggctgctgaaggagctccgcggccgatcgcctcgatacaatgccggcagtactacggagccggtggtcggttaattttcattgagagccacttaaatatttgtttgatatttgaatcttgagaaaatacccaaaaaggggaatattctattgattttttaaacccattaaatagaaatatgataaaatattagggggtatcatataagggagggaaaacgatttggtgagtaaaacgctggcatcttcagaggtgggacaccttataaatcaatggtatggttatattcgttcttttagtattccagattcagagtatttaaagaaagaaattgagaataaacttgatcaaatggaagaagaccaagatctgcttttgtactattcacttatggagtttcgacatcgcttaatgttggaatcccttgaaccattagaaaaattaagaattgatcagcagccgaacctttcagatttattatcagaaattgagaataatcagtctcgtatcaaaggaatgctggactactattttaatttctttaaaggacaatttgaattttctaggaagaattatattcaagcgatacaatattataaacgagcagaattgaagctagatctaattcctgaagaagagaaaattgaaaaagcagaatttcattataaagtggcagctgcttattatagaatcaagcagaatatgttttcgctgcatcatgcagagatcgctttaaatatgttcgaagccaataaactctatagtacaagtaccataagttgtgaaatgatgttaggagcaaataagcttgatcttcttcgatttgatgaagcagaggcccattatacaaatgccatgaagtttgctgaattgacaaaggataattattcaagaggattggcttgtcataatattgggttaagctatgcgcttcaaaacaaaagtgacttagctgaagaatatttccgaaaagtccttgaaataccagaatattatgaaactgaacgtgggttaaggactgattttgaattgacttttgtcttgtataagaatggtaaaatagaagaggcacaaaagcttttagtaaagggcatcaagaaagctgaaaaagaaggtgaagcagagtatttggcgaaatttaatattgtccatgctctttacggtggcttagaggcacaaaagcgtgatgatcttattcagagagcattcaaatatcttgaagaaaagcagctatggacagatattgaagaattgagccaagatatcgcggaacattttcgcataatcaaggattatgcgaatactgtattatatctggataaggtgatctacgcgaagaacaaaattctcagcgtatcggaggaattaatgtgaagaaaatagtggctgtcgcagttctcatctcaattatggctttatttttctctgtatttcataataagcatgatgagaaacggttggctggcagggccgaatatgcaatacagggaacacattatacggctttagccgatggacagtttgaaacccaaggtagagctgaatttgcatgatcctttccctccgacgaatgttcggagggttttacgtatgacaaattttatatttatcatcaaaaaatgattctaacgcaaaaacaaattcaaaggggagaatgcctgtatgaattttagaagaggcgtctttatcattgtatcgactatcgtattaatgtcagggatcggtctaactgcatcggccgtttcattagatggatcatatcaagtttcgtctgatcgtaatcaaacctaagaaggagagtgcctgtatgaatctaaaaaagagcgtcttcatcgtcctgtaagtgggttgggtatgaacttagtagagaaacaaacacgagatacaacccaggtagcgtctgatcgattttgacttgaacaacttacgccttttcttcggaaaaggtgttttatatttattataaaatctcaaaacatccatctgttctttttcttatcccatttcagcaaacgctgtctcatgagattcttaattgcttctcgtatagcgcgttcatctttaccagtttttctcttcaattcttctaaggtggggtttttcccaaagtgagtcatgttaaaaatgatccggaacactttcctctcaaagtcattcattcaaactgcctcctcgagtagataataccagaacggacctaactatggggaagccagacatctgaatgcatggggccgatgaaggagatccgtagctgttggctgttattagggcaaataaaaagctactgcagctgcagtagctaaaaaagggtttataagccgcaaaatcaaattagcgggaagcgtaatcaatccagcttgcgttataattcacacgttttttagaaccctgattgaccattttaaatctatatgaatctcctttttttaaccaaggtgtttcaaaataagttactccatttttctttgcattaaaggttttaattgttttccaagcgcctttgctgttgacttgtttttggatgtatactttatacgtgcctttccctttactgctagacttaattctaccatcttccaagctgaatttttttgttgtttttgcgttgaatttagggtgctgtgtaaagatcacatagttagtgaaatacccactcttataagtatgcaaccagtctttagcttctgctttttgtggagaagagaagcccataaaaccaatgccactaattaaaagtgcaaaaacaatgattaatgacttaaaaatctttttacttttcatggagaaaatccttccttcctgtaactatttaccctatttatgttaatggcaatataaacaatcataaacccgtctaacttactattttgaatgtcagaagaggtgggtttaacctaaaaatgactatattactaatacttatgattcattattttgtttggcttgggaataaagttgttttatgatgatgcggaatatatctgtttttatatcaattgtcatgagatgattttacgtctagttctatgtgtatgggcggcaaagtaaagggtatacaagattcattataccggaagcccaagcctgttaaaatgcggtgggtttatctccctcagcgcagccggtcttcttgcagtggtgtatcgaggatgatagtcgcggatctccttcagtagacagggcgtcccgttgtctggacgcaggggcataataaggccgatatctggctgcctgcggacccgcctgccccgcaacttctatgatccgcgcagattttaaggtgaaggcgctaccgatacactaccgatcgctccgtaaacgcggggcgttctcgccttaggatgctctcctgccggcgccacatcggaaccgacagccgcggatctccttcagctgcagccagggcgttccgtcctggccagaacacaaaaagccggcgcctggtcggctccggaatctggcagcccccgcagcttcgatgagccgcagagatttcatggcgcggcgcgctgcagatgctctcccgatcgccccgtaaacgcggggcgttttgccttcagccgctctctcctgccggcaccgcatcggcatcgacggccggggatctccttcagccgcatccagggcgtcccgtatctgcccaggacacataaaaagccggcgccaagccgattccacaatcctgctgcctcgcagcttcgatgagccgctgagatttcatggtgcggcgcagccagcgcacgcctgatagccccaaacgcagagtgattttcgccttctacacgcggtctgctcgtctgtggtataaattggtgaaggatcgtatctataattacctttaaaacatggttgcatatataactagtgtgttttacactatagtataaataagaaaacaggatggttgattatgaatagccaacttagaaaaggcgtaatggaactgtgtgtcttggcaatgataagaaaagaagatttatatggttacgaattgataaggagtctaagcgaaaaatttccggtaaaaggtgaaacaatctatcctgtcctgaaaagactgactaatggcggcttcttatccacttatattggtgaatcatcccaaggcccaagtaggaagtattataaaataacgcctgaaggagagcgtcaatatcagctcttacacgccgaatggtcagagttttccagtgtagtgaatgaaatatttgaggaggaagagcattaatgtcaaaaaacgaatatttaaaaaggctccgatcatctataaaacagttaccaaaggatgatcaaaaggaaatattgcaagatattgaagaagcatttattattgggctgtcttctggaaaatcagaatacgagatctccacgcatctaggaaacccacaaacactagctaaaacccttatagcagactctattattcaaaactctaagaacaatcactcagtacagcatttctttcgcatcttcatgcgagtgataggcatcagtttctttaattttttctttacactttgtcccttcatactcattgctggcattttggtatcgctttttgcaacaagcataatgtcagttggcgcagcactttttgttgttcctcgttcattttttaatgcccttttcgtcttaggtggcggggtaattctttttcagatatcaattgatctaataaaggtgtttatcaaattctttttgaaatacattaactggaccgtcaagttagtaaggaggaagaaaatcgatgagaaaatggctttatagcgttgggttaacacttatgataattggtcttatcggaagcattttttttggtttttctggcctctggtactaacccctcagacagactaatcaaagtaaaagagatagctgttatttataattccaccattaaagaatacacaccaagctagcattctatcggcattagataacaaacattatgagcctattgtgttccactatgtccattttccgaataaaaacaggaatgttgtaagaatatcaaaatttaagttgtgaatccttacccgatatggtaattttgatttgtaataccaaataaaccctaattggaaggagagatttcaatgaaaaagaaggttcttgcttcaattgtattaggtataggtttactaggaggacaagctgcttttgctagtcagtcgaacgatgtcaatcacggggaagttaatttggacgaaacaagagatttaatgagcgccatgaagcttgataaatcaacaccgggcggtggtacgtggtatcatggcttcgaaaaaggccaagttcattccaattacaatcataagaaaaagactcacaaatcgagtgctgcggctggagcaagattctatgaaactcaatggaatacaaaaaatgaagggtatacttacgcttctgtatatgaagcccttttcggaaacaaggctttttgggatacaaaataaagaaaactatagcaaagtgatttttaaatttttcttccggtgtggtcaaacttgaatacaagtcagcaccggatttctttttatggaggctgcccaatgaagaaaacaatctacatattgttcattttggttttgctctcaatgaatatgtcaagctatcattacactcttaacaaacaaatctattacactttattctcaaataaagaagcattgataatcaattatacttcagaatttaaaagtgaggactttgtaaagagattggtcgccttctccaaagaaaacaaagtgaacatttctcaatacaatttcttggatgaaaagagcttaaacatctattctacaaaccctgaaaatgaaccatcaatacataacggcaataaacttgtgtcaaattttctaagaggccattcagagcagaagatgatcggcagcattacttttccgctttcgacatggaaaatcagatattttgatttcaatcaaataaagaatataggcataggaagcaaattttacatttcctctaaggatgataaggtattggaaaaagcacaaaatctttttgctgactatggtgaagtaagttatgaggacatcactgagaatactgcttttatgtttaacaaaactttgcttatgctagtgttgctctctatgctgattttgtttattggtgtcctttattttgtaattaaaaatcgcaaacggcttctgctgcaaaagttatgggggtattccaaagttaaaacactgctttcttacccagcaatgtttttgaagcctctaattataatcatattttgcggcgcaattattgtagctttgctaaccttttctttcagtttaaatgactggttggctgcatatcttagaatttacattagaaacgcggtgattggtgcgcttatcatgatggtatacaccatcatggttaccctcgtcttgtataacaacagcgacattagtggctcgatcaaaggcagcacaccgattaaaaaattccaatggttatctgtaggctttaaaattgttgtcacgatattgcttttcaatattgttgcgtcctcactttctaacttattcgatctcaaacagcagcttgataatcaatcgtactggaaaaagacccaaaacacttataagacaagctttgcaaataccgggatagactatagtgatttaaaattagacagggagaaaaatgttagagttcgcgcgttgtatcatcaattagagaagcataaaaatgcgttcgtcattgatgcacataactatgctgtactaaggaaagatggaaaaaaacctgtttatttttacaccttaaatacgacaaagaaaaatgaaatttactctccttctggacgaagcattacaatcagccctaattatttaaaggtgaatcccattatcggcgctaatggggaagccataagccaaaagcaattaagggctgattcaaatacattgaacctgcttgttccacaaaagtatgaaaaatataaagaaaaaataatagctgcatacagggatcactttttctttaaaaaagttgaattagataatatgtataacaaggagattaatcaacctgtaaacaccctcaaaaaagatgaattgaaaatcaacatcatttatactaaaaataggcaggagtatttcacctttaatagtgagtttggggatgccggcaataaaaataacattgttgatccaatagctgcaattttcacggacaacgttgattcatctgttataggggcttactcaacctcaagtttattcttttcagattcttcaaaaggcatggcgtatgaccgcatagttccttatttggagaagaccaatacgagagatctaattgattcatcaatttcggtttatcaagaactaagcgacggtatagcaagaattcagaatcaattcttgcagaatttaattggactaacaataacagttatcctgtccatcgcctttcttgttgcttatatttggtcgtattacagcgcaaatgcatatcggctgtaccttaaagagctttttggatattcatattgggccagaaataaaaatttaatcatcttttcccttttaaccaattgccttataggtttaggatgcagtatttattacaaaatcttcgaattaacaattttcatcgcgctgtttattgtaatcgagctgcttattctttattttctgagtgtctatttaaacaggagaaacatgaataggatcttaaaaggagatagaatatgattacactcaacaacatagcaaagacgtttgatgaaaaacctgttctttcgaatttctctcttcagataaaagaaaatgaatttgtttcaattgttggtaagagtggttcaggaaagacaacccttctaaatataataggccttcttgatactccacactcaggagatattgaaattttaggttttcgaaaccctaaatctaacgacgtgatgaaactacggagagagaacttagggtatatctttcaaaattacgtgcttatggacaacgaaacagtattaacaaacttactgctttctacggcatatgcaaaagatttcaagaaagaaaagttgacagaagctttagaaatggttgggcttgataaaagctttttaaagaaaaagatctatcagctgagtggtggagagcagcaacgtgtggccatcgcaagaattattttgaagccttgtgatattatcctggctgatgaacctacaggaaacttagacgaatctaacaaaaacattatcttgtctttattccatcagttaaaagatatggggaaaacaattatttgtgttactcacgatcaagaaattgccaatgggtctgacagagttattaatctttcataaggagaggtttaaattgaaacacattgtttttgcattatcagcaagtattctggtcgttattgccggagtggtacacagaatactctttagagtgtttggctttccatttgatcaggctatcttcttttggggcggattcgttgtagtttattttatcttagcgttgctagcttctctgctttttagaagtataggttcaaataacagaagtagcaggtatgaggcttaaaatcagcgatcaacttaggaacgtatttctaggagaatgaataaaacaaggagaccagccgaagatgccggtcttttttatatggagtggaattagccaggtaaaggatgatcatctatttgtacatctgaagtagcaaaaatatgagtatagacggcctgcgagggtttcgcggccgtcggccccgatacggcaccagcaggagagtatctgaaggcaaaaacaccccgcgtttacggggcgatcgggagtgtaccggcagcgccgcgccgtgaaatctccgcggcttatcgaagctgctcaaccgtttcatttttgaaacggtcggaatttgagccgctgctgtttgcttctcgtcctggtacggagccgaccaggcgccggcttgtagtctggtcaggacgggtcgccctggctgcagctgaaggagatgtgcggccgtcggccccgatacggcgccagcaggagagcatctgaaggcgaaaacgccacgcgtttacggagcgatcaggaatgcaccgatagcgcttccgccgtgaaatcttcgctgctcattgaggctgcggaggcgacaagattccggagccggccaggtaccgccttttttgtggccagggcgggcaacgggacgccctggctgtaaagagccggttcctttcagccggctctgtctctactatcatttaaaggtgaaaaaagattatggaaaaaactatcaagtaaactgccaaaacagtaaagcacaacaattccagctaccacgctcaaaattctaaatctccgatcagcactataccagcaagaaggaaccaatattaagcatacaaccattataattaatttagtcgtcaatttgatcaacctcttggttttcgtattgtcctgcaatgtacatattattattatcatcaatcaatatatggtagcaataacgaaattcttcatcaacataatatggtatctgagatggaatatcttttgatatattcaccatacctttttcggaatctatagattgtgttgctaaataatcggcatctgtcattcgttcaacaaaattttgatcgttcgtataaactcttaaaatagtgaattttttcgttttatcctttcgaaataagccattaattgatttatgcattttatgattactaaatgcaattgcagaaatataccacattggcacaaacataaaaggcagtaacattgcactgaaagtatagagatacatgtagcatgaaaagatcaaggtcactactgctagtatcgtgatccaatgcttatttaaaaaatctttagatagagttttcacatcatttaaaaataacttaatattcacatcttctccttcctagttcaccacacgccgtacaacaccgctaaaatgagcacgccaataggtattgttcatcttatctacctggacaccatgtgaactattatcatttaaaaacttcccatcccccaagtaaatacccacgtggccattagtcttataagtatcaaaaaagacaagatcaccgcgtttcatgtctttagcgtcaacttttttcccaaatttcacaagtgaatcagtaacaactgatgaaacatcaccaagattaacgccgccttgagcatacatccaatggacaaaagaagaacaatcaaacgaccttctgttgatatcaaattgatttcttcctccaccccaattgtaagggcttttcccaacaagctctaatcctgctttaatggccttttcagctgcttcaggacctttatcttttccaggattcatattgccaaaactaacttcttcagctttcccagatccatacaaatccatatattgaattacttcttggacataccagtcagcattattgtaagcaaaaatggctttttgaaagtcaccctttgctgccccactagcagcaagatagtttgccgcggaataaatagaatcttctaagtcccatatatcagccttgccatcaccatttgcatcgactccataaccaccatattttttaatcgttttcaaatcagacatttgactttttggaatattacctttcccaagtccactacaagaaggatgtccccatcccacccaagtacatggcataaactgaacagggccttgagcccccacatttgattccatctttttaattgatgaaaatcttgtttcaattctatggatagaagcaagtaatgtccaaggtaacttatatttttcagctgcctttttatatagtgggatatattctgctggtatttgattctcaccaatttctgatatattgatatcagaataatcactggtgggaactaattctttttgatttgttaaaactccaaaagcacccattaccaaaatgaccgccataacaattcccgaaattactaatatagctgcgctgatccctaaaccaatgtagatcttgattttcttttttttataattatatagagtgtttagagccttaacttggaaggttgacactaacatcactcacctttttttctcctgaaacatcctttattgtaacaaggtaccaatcttcttctgactttgatttaccctctttatcaaaaacctgcccttgcataactacgttccatcggacaagatctttattatcattagaaacgtcagtaatatatattttttcgggtttaactttataatgggtcaacgtccctctagttggatgttttttcaaagcattataaagctcttcggtcatataatcttttgcattttctatgttatcaataggattttcagcattaaaagcagcataccgtttcacaaattcttcagctgtttttttcgtttcttttttttcctcttcagaaagtctttcagcttgatctaaggatgatttatcctcttcaagactcatagctccttctgaggataaatcatcttcagcgggcttattaatgttattctgcttggctgatgcgccatcatctttggacacagattcatttgagctaaagaaaatagccagtccagatactaaaaacagagcgacaccgacagcaagagtaaccaactttttatgacgaacactcacccgcctcactctcctttattttcattcatcctttttcttatttggtctaactctcttgaatgaggattttgttgattagtttcattagaattagctgtctcgtctcttttaggcagctgaacaatattatcagcagaattgttttcacgcgttctttgctccatcgctttcattttagctttctctcgtgctacggtttgatattctcctgtttgcctacgttcactttctggttttaagttttcaggagtttgcggttgtttatggattcgccgtttttcttgtgcttcttgcctgcggattctttgtaaagcttcttctccttgaggtctcttttgcacagcggtattttcattctccccctgtcctggttgctgcttaattcgttccccatcagcctgtcttttctgcatttgattgattaaatgctgattcttgttaccagactgtttttcatctctgttttggcctttaccattctgatcagatagtttacctgctgacagttgttccaaatccttatgacttggttgttttttaatacgattatcttgtttattcttcttactattaacattttttaaaagtttatcagctgctttattatcagctttcttgtttagattagcagcagctttattgctatctgtcccctctgaagcttttattggggctttatctgatttattcaacctatcaatatttttttgcagtctattcggacttcctgatgatgtagttcttccagaggaatacaatccacctccaccaccagattcttgaatacgatctttcaccatttgttgttcttttgaattttgaaccatcttttgtgtaaattctcgtgctttttctaagttctgcttaacaatttgatatccccaaagtttagatgaaagcacaatcattgtaataacaactatagccactcccgtaacaatagataagtaattccagtttttatcctctgctaccttatacactatatttacaaggctgaacatcaatatgagtgaaaaagtaaatgctactgacattgcaagaaaatttaacaatttaagcacccattgacttgcaaacgatcgaaaagtaggcataatcgcagccattataatgaaaacacctattgaagcttgtattaagaaggcagcactgtatatttgaactagaaaagacactagtccagcaaaagccaaaattaatacggctggaacccaaatgaggaatgataatacagttctttgattggtatactcagctgaaaacatagtatcatccaaattttctttaataaatttcttccgttcgtcactttctggtttagtttttaaaagcgttcgcaacttttctttaccagcctctatatccttctgtgtaaagtcacttttactttttgcccccccaacaattgctaaattagtcgatccaaattccatcaacatataaggcttaacaatcaataaatcatgaagtaaatttcgaattctcgacaaaccataacgtgatgatgcagcgtcggtgtatcttggtgtatcttcacctttaactcgtccaccagaatcttggctatctaatgagtatgttgatgaacttaaaacagcgtttgatactgccaatcgtttatcattcataaaacccagaactgattcactattctgaacatacaaggtgaaaaaacctgataataacgcagcaattagaagtcctccaatagcatgtctaaattgtttttttgcagttgtatacactagccaagctgaagtcaaaatgagcataaaacccataaattggccaatcccatatggaccgccaatctctgcaataaggtcagcgatgtagccaatcatagaacctatcagatcaaaagtaaaagcttgctctataaaatataatcctgagttcacgactacagtatatccataccaaagacccgaaagaattgtttgttgaaacgccagaatactctctattacttcatccttgatattaaaggggtttaatgacttaatagcatctaaaattcctccctcatcctcatcctcagcatagatatctaaatcataattttcgatcggatactcattatatttaactaccggcgcagaagtatctggcaagtccgattctggtgataaatcatccataacattaggtttagctgatgcagcagaacaaggaataagcatcagtatacagaacattaataaaccgcagcggataagaagccgcctcttttttctcatttataccttctcccttattcatcttttttgacaggtgtcggttttaattcgtctttctccttctcagtcaaactgtcggagaaataatatttaggagtgattagctctccattctctttttctatacttccagcttttatagatccaaaaatttgttttgctaaatattgattcttaactttttccatcttcacagaagtaacttttttttcattgcttctcaaatcaaaaaacacaaacttataaatatattcactgcctggcttaatttcatattcgatagcagcatacttttcaacagatttttctttcacgttttcatagtcatctgggagcttactctttgcgtcctctaagctacttgatgttttaccaccgttgccccctatctccattgaatacatcttgtcataagcattttgattatcatatgtgacgtattctaaagcccttttacacgattctgtatcttcacatttttcttttccgcatccagacaatagaagaacccctagcaacattacagaagtaataatccttttcatgttgtatctcctttctaatagagggagagatattctcccctttaagcgttcaccatttcgctaaggtcttttgatgtgtcaaacgcattatatagatgatcctgcaatactctgaattgcattaatccaaccctattgtctaaatcgcgatggagacaccaaccggaagggagtgatgggagcaattgttcaatgcccgcagaatcatcaagttgcaaaaattcttggatagcttttatttcatctttattatcagccctgaagcaataagcagcaccaatttgtcccctaagttctttcggtatatctttaatgttttgtgtcatcaatgtgacaggagataacaaactgcgtccttctctaaatattttatcaatcaaacgtgttcctgctgcattattgaagaaattccaggcttcttctataacgatttctgttaaatcatttgggaacatgcgcaaaaacttaatcatataacttgaaagcccaaacaaaacagcaactgaaataatattttgttctgagtattcttcctctggcaagtctttaggtggaagtgcaagatctgctacttgtaaaatgttgaactgtttcgtagcatccaagtgattttctgaattggtcctttctgcaaagaagagccgagccagtgaaatagattcaaactgttccaaaatattggccaagtcttttgcaatttctctatcatcctcagtcaactctggatcacttttcactgcttctctaagctctgttttaacaaatcgaatggcaggctgttttctttgtgaaactcgtgtgcatgccttggctaccaacgtacttttcttaacatcttttctaatactgatgtttaataaatagttaataatttccctagcaacatctgaagcatcctgtcggttttcaaaaataagccacgggtcaagcttcccggcatcttcatcttttgttgtaaatgaaataaaatttaactccgtaccaagctcagtcaatttttcatcccagtgcaaaatgtctttcctttcactcttcggatctatgagcaacacttttgttccgtacaatgcaccttcataaattaaagagttcccagccattgattttccagcaccagtcttacctgatagaaccctaactaaagattgggttgatgtttgtgctgatgctgctcgaccaggccgcataaacacagaagtgccgctggcagtcctaccgatgtaacttccgtaatcatcacctaattcttgacgattcccaaaaaagcttgatgtaacagcgttaacatccacatcctgtataaattccgtaacgtacctacgtgatccaggaaggcactccataagacttctcaactgtaaaccaaatgtattttgaagctttatcccgcctactgagctatattcttctattaagcttgtcacattaacatctagttgttctctactgcttgcgcttaccacaaagatagcgctcattaaaaagctgccttctctctgcttttcttcctctgcaatagtctgattcgctgttgcaattccatcatatacattagaaccagcatcttctccaaattgagctaaatgattagcctggtcctccaaattcgattttttcaaacgcaacttactgatccttttatcaacattttgatagctcattttcagactaacaccaacactaaactctaaatgtcttaatggttcaagccatctcgtttcaggaaaatatacaatatcgtccattgttgtcatatgcagaaaagaaatataggttttttgattatttccgtaagcatccgtttgattaagtacaaggtggagacgatctttggaattttcaataccggtcatttgcaatttcataacttcttcttctgtttgaacacgtgcaactacttcgccaccttttccataaaccggtgtatacttctccgcccaccctttattatcaggcagatgtctaatacctatattaaaaatccaaggcaacagttcagacatttcctctgtagaaagctttttatatgacatttcaaagctatctaaaatgctctgtactttcctagcactccttcttgttttttctaaaagttcctgtcctaaataaactgagtgttgcccccttaaccgatcagttatatttgacagatactctttaatatttgcaaatatctcactataactcatatcttctacattttgatcattcatggtatcttggccgagctctatgcctacataaaatttcattttattttcttctgaacctaattcgtcactgtcctgcaagtagtcaaaaatagcttttgtatgctcaattccaactgattttaaattccctcgaaactcccgtgtgtatctttcataaacatcgtttaaagattgacggacgggaaccacaaggcaatgaagctctcttttcatttctttaaaaagacgtttcaattggttgaaacgtcctatcaattgagcttcagaatcaaagctggtatgaaatcctttgaattctacccataattgttgcctcttatcttttgtataaatgacgttttcgcacacggctagaatatcactctcgtatttcaatatttttcacctctttcggatatttgaaatgtcgcttcattctgattttttgttcgaatcgaatttctttatcttgttcaacctcttcaaatcttatcatttcattaggctcatatttggttttccatttgatgatccagtaacgaatcatgctcatgctttccctctgttgcattcccaatttatagcctaatgcaagtgggacaataataattaatatcaagaaacgggcaatcgctggaacaaacggaaaaagccaattagaaattaaatacgctggaatacccattaatagaaagacaaacgctaaaattgcctgcgtagtcgtggcagagaacggaagagatatccctccgtcactcgatcctgctagcccacgaatcacatttggaattttgaacacagctgtggtacatcttcctcttatcatggtgatagacacctcccacattacattagacccaagaatcgaagaatggactcccctaagctcttaatattgctaacaccgtaaacaaaaaccgatagtatagctaacactaccaaagcaccgaatgcagctctaaattttttaaaggcaagcaacataactagaattgcaagcgctacccatccgtaaatggtttgaatagtcccttgtacattgctatcccccttactttgaattccatcaatattaacagcgcccaatataaaatctaaatgacctgagttttgaacataatcaaaaaatactgaaagcatataaattcctcctaatatattaagattttcttttattcaactttggcagataggtttctcatctctacaatttcatatttatccgccccctcatgatttaaaataaattcatatccataaagactttgaatatctgaaacagattgttttaattttacatcgctacggacaatatattgttttttcttttctccaggatatactttcaaatcttcgattctcacaaactcataagagccctctagtgactgcgcatcattggaatttttaaagaaaaatttcatatcatctgctctatctttattgacataagagttaaaaaacgattctaaaaatgttcttacattattcgtagcagctttatcttctgtaagatcagcataatagttatcaaccgttttcttctcagattcctttggaacatacggttgcggcagatcaattactgtatatccagtatcatctgcgtgaacacgtatcacataatatagttttcctgatttttcatctgtatcagttacctttttctcgacctctacttcttttttctttccttttttatctttctttttctcctttactttttcaattcgttctgttttaattacagacttaatatctgcgtctacataaacgtcagccgttgttttagtaatccctttcacttccatgatcctacttcctgttaaagtttgttctccttgcacggaggtataatctatccctccatccgggtccaaaccattagctaaatattttttcaatctgtcttgacgttttttctgattgtcttctcctggttggatatcaaagtaatcattaagaaaattctgaacgaaataagtaataccaggtctttcagcataatcatctttcactttattttcttcagcagttgcagcatctactttttcttccatactgtgaatgactccattatgccgaaatgcattaaaagaccctaagagcacaatcacaagtaataaaaccaaacctatattcattgcgcgctgaaaagtggacggctttagagctacccttcgtgccctttttacttggtatgctttttctttttggtctttttttaaggcagccggatcataaatttttttttcagcttttttcgttttccattcactcactagatttttgaaactttttttgtccttttttggtttttctgaagaagagcttttctttttgccccatttattcaaattacttcacctcttctttcctgaaaatataaatattgcgcaagcgattataattaaagctccaagcaagccatattttgcgaccaattgagaataaaaatgggagccctgtactttgacagtctcccaaacatctctggtccctggaaattgagtgagaatgaaacttcccacaaaacaaattcctgcaatatatatgagcgctttaaaaattccgcgaaacatatacactgagacctccctataattctttttttatcattggatcatcactcaaaatgtgatgatatatcggatcaaatgcatgccgttcaacatctgctttacttgcgactaatattggggctttaatgtccatgttatgaatactcaaaatatcatttattgttttcctagtattaggttcattcccaccaataaacaggactctccagtctgaaataggagcttcaaaccccacatgcatatcatagtcttttaaaatcttcttgtctctattcaaaaaatcattatatcggatcactttttttattgtattttgcctttttgcaacactacgttccagctccataaaaagcccaatgttatcattagaccctttcccgccaaaaaccaatattccatcaggctttattacatccgttttatcatttgtatattgccaggttgctctagcctctggtatccactctttaacttctaatccaatttgttcagcttgtttagtgtatttcataacaattcggttcagcattaattgatgttgataccaaggtggcaccctttgggaccacctcggattccatttaacaacaccttgcaattgctcaacattttgcaaaccaaaatcagtaagagtgtagatgttagccggcctggacatcccatcaatcgggacggtgaaacttactaaatatcccacatcttttaaccttaataacctttgagttagggttttttttgtagggtagtctgtcatgatatattgatgtataaaatcagtgtccatatatatgaattgatgaagggacagaagcaagtttttgtcactttccgataaaacggcatatcttttttgcttcatttttttcccctttttctttttttcagggattgtatcaggttgtgtagtaataatgtccaactcaaatcaccttttcttctttattcctccttttgatcatcggcttttgccttcatcctttgtaatattgatccagtagagaaattttgattctctgtttcaccttcgattttgggtcttctctcttctgtcttatgctctttctgattatttaattgtttagtatcttccttcttttgaagtgtaagaggaatcgtttctgcctcagtttccatctgttcctcatgaattttttttgttctcataagatgcaaaggggtttctggttgtttagtaataggagccttcaatttccgcggactttcttttcttttttgcggaacatactcttcacccttcagataagcttttataatcaaatcaatttccgagtaatggaaaccattttgtgaagaaagctcctttgccttttctaatgtccacgcattggctgcggcaacctcgtcctctcttctatagttagcaaccgttccatcaggtaaataacgatccaaaggaggtacttccactaagcaggtcactgtttgatcgacaccatctatgttatcttgagtgcgaactacagcaactcgatcgggaagtgattgtaaaaaactttctgagtagataggttgattggactcttttgccctgaaaaacggtgtagttacctttgcatcatcttgtccttgtcgacaaacaaagaaattaccttgaacatttgtcattgctttttgcaaatcatcgggaaggtctttaatagattgggttgcaattccggctgaaagtcctttcttcctcatttctcgcacaatataaggaaatattgaagctttaacctttgctgcttcatcaacagttaattgatgcaacaaaggtcgtccaggtctttgttctgctacccgatagaatagatatgttaaattacttccaattaagctgatttcttgctcccccataccactaaaatcaaagaaaataaaatgtccttcatccatccacttacggactggaaaagcaaactctttttgaccaaacatccgtctaaataggtcatttgaagtgaaaatatccaaacgattaaaaagaggaatccgacttaactcaattaagtcaggggcttcaaaattccaaaaatcaactaaatcatatgcttctggaactttcgaaagcctagatacaacacgcatccggaacacctcgtcattaatcagctgtttcacacctaagatggtatgtgtttcatctggatcaatcacaagggtttttatacaatttcgaagcagcctttcagcttgaggagcaacagaaaagttttctctaatgatccgcataacaatatcagtgacaaactcagctgattctccttccatgcgatgaagcagattcattgcaggaggataatcagtatttttgaatgaaacccaatgcaccttactccaatcaatttcttttccatccagctccgctttgcaaatttggttaagtaaaacaagagcagtttctatggccggatcaacaaaagaaaaacctggccccttcccgttagcaataaatccatcaataaaacttttcaaaacagcattaattaatgttgacttcccagatccgtttaaaccagttaaaagccaatgtttccccaatacatccggcgaaaccttcacctctcgatttttcacaaaaggatggtattgataaccaaacgtaattccttcaggactgcttaacacattagcagggagaagttcagttcctttccccgcatgcgcaataagtttcgacaaactcttcatatgatcacttttaaaattcggcatatgaatgaggttagccaactcgctgcctgtccacaccatacgatacggcttatttgtaggaaaccattgtactgatcgttttagctttttataacgtaattcgttcgtgtcattagcaatagaacttatagtgtttccaacatttttgatgattcgaactcctggataatgttctgttgccatagaaacagtgcaatcaaaagcaacctcattacctgagaaacgatgttttaaactatttagttcttctttttcaaaactgctttgatcacttgccttacgatcccctttgatttcctcttctaattttagaatgccttttcttaaacgccatccgtcattcgggctaaaagcgacttgtacccaagtctcattttccattgtagacagaattccagatagctgatcagaacgataccgccttaatgggagagatttcttcaaagagttattccgtagtttcaatcttcctcctaccgcttttttactcggtattggcaaatcctctacgtcaaaaaattgcattctaccataaacacttttaaagtttgctttcaaagtctctaattgcgaactctcagcaccaagataaaagttgtatcccgcaccctcttctggagaactgcgataaataacaaatgagtaccactcacgacctaaaaataaccgctcaagaatttttcgtttcgaaccgtgaatacgtctcattaaatttgataagtcttctgcggagactccatcatcagcatgcgggagtatatgaacatattcataacttttttgaatccttaacacatagaaaattttcctcaaaaccataagtaccgcggcaagaatcaaaaagtaaaaaacaaaacgttggattgtcttcaaccagtaatgtaaaacatcctctgaaattgaaagcgatgttaataaaacatcccacttccaatatccaaagaaaatcccaatcaaaattactacagagattaatcgtaaagggtgatctaaaaaatggtccaaaacatcatccaatatattcctttgtcttttctgctgattaggcatcaaaaaacattgcctccttacatcagaagaaacaaaagcaaaagagagatattcaattatcaaagatcagatccatataaaatagctctgtcttgatgtcccgatttaagactggataggtgtaagtcttgatgttgctgtcttgattttgggtagttaggtcttggtgtttgcagctctatatggagtaaagatcagcatacaattcagtggatttcaaaaagaaggaggtaggggtttgattgcccggccgtcctgctcatatattgattaaaatccgaattgcagaagttcttttttcacttccagcagctgtacatattaaaaagggttttaatatgtactctgcaggaagagaatctttaaaagtatctgtaactacatgttacacccaaaacacttttgtatcaacgtctcaagcctatttttatcctatgtttatggtattctattcaaaagggtactttcttaccatgtccttcttatatccttcgcaaaaacatagtataaaactcacattaatcttcaagtgttgtattatatattttgatcgttttatcagggcgatcaggttgtgtagttggccaaaattctcttgtgggattttggccgttttaatcaaaaatcatgtttaaaatgagaagaaaaacgcttaaacaatcctaacttcccactcgatttttttcgcactctcgcacttatctctaattcaatttcttccagaaattcctttattttctctatgtcgtgacagtcattttcacgtaactcatcgagatatttttgtctcaaacagagcaatttgatctcgctcaccttgccgatatccaatacaaattcagtaatctccgaagcacggtaattagacaacagacctttcacagttccaaaaagatactttaggaatgagtcttgaccagaatatcctcctacagtgggggaacccttctcgccaacagttaaagaaatagcctcaatcaccagattcatatagtcctggacaacagcgatagacgaaaaagcaatattaaacttcttgaatgctagttgaacgcggccccaggcggcaaaaatgaaacggccatcggtaaaaccgcggttaaataaagcgctgctaaatcgtcctggaacattaccaggaacaggagcgcggccaggagaggaaatcgtaggtgaaacgtacctggtaccatccagactagaggataatgtagctgtaggcacagtaccaacaagagcctgcccacccacgcccttcccactgttattagagagtaggacatttatttggccacagaaggattcagcagcctttttagatctgatcgtattaaattgttttgtagtctgctcagaagcgtttaaatggctctcagagcttcttaaatcatcggcaggtgtttttgtaggcgaactgtcatctgaagctaacgtaatgagtgtgaaacctccacgccctttttttgtttccaccatcaataagccctttaaaatcatgtttttaaggactttgcagaatgtactgaatggtttttttagcgtggcagcaattgacctttgtgagccgataagcgcctcgttttcctttaaataatcaacaatgtcttgctcatgttcactaaaatggcttctaactcgttcagagcggggttttgcaaagcggctgttccaatatatcttctctgggtatgcttcacctgtgaggtattcagctgcctttctgatgaaactatagcttacataacgattctcagagcgataaacagatttaaccttacctaatagctctctttggctcattttcttcttattgttttcattccagcttaaaaggcgtacacgtgcctctctctgcgtcatacctgcgattttataagcacatgccaaactaaatgacacccgatctctcatgtcatcaaaaccgccattttgtacgtctctaaaggcttttgactgcattaaagcgccattgtatgtagaaaaattgactgctcctttaaattgttcccctctctccgcgaatttgcgttcacattcaagggcataccaatctgtaagactgctagaatgcacgctatgaccctcatacacaacattatccggattaggcgctctaaagtagtgctccgcaccgattgcatccaaatcgcctcctatagcttcagcaatgcatctttgaatacggccataaacttttacagccttcctggttgctctaaaaggagttttatagacccatagcaagtgaaaaccaccacttggactttgtagaattgttgttggatacggcaatccagcagcggaaacacggtcgagaacgtccggaagtaaaagaccggcattatcagtattctcttgaccttttacatcaatttcaacacacatagcattcaaccaccggaggttttgccgcgttttccggtcattcctataaaatgtgttatatgtaatgtgcgttatattgctcttgtttaagtgttttttcaaagtttcatatgtacgaacaccaaactcttgagagaaattcccctccggcacaagaaaagcaaagccataatcctttgagaatttattttgatagtcatttttacgagatcgagccttaccttttggcttctctgtcatttgccctctaaagatcgcttctacaggcgttgggattgacaacagcttggcccttttttcggcagctttatattgtttcatatcatctttgtacatgttcaacgtataatcagctaacagggaagtgctcatgatctatacctccatttttccggcaaacaaaaagagccgttagtaagcggattcgctcaccaacggctcatatttagccaacaattttgaagatacagataggcatacgcacatgacgatttctcgaaatgcgcgaaaaaatttgcagatattttgaagtctaaatatcttgcaacttttcctgcatactgatattataggtacatgagtaatacctataaatcaatatgtatcttcaagctcgttggtttggacgccttgggagcttgaatccgaaaggtcagtgttggtagcactgatcttttttcttgcttgttttattttcagaatattcagatttaatcataatcctattttttgtttgtttatgtctcttaatctcagataatttcgatatgttaataatgactatacaagattttttttcctacgtctaccctagaaccgaccagtgaatttcatactagataaacacattgattaaaatgatatcaatttggttatcgtcatgatatcattttgatatcattttatcaaataaaaagagcttcccaaatacatttttaaatttgatatcatttagatatcatttttgatatcattcttaccattaactcttgcatttttaaacaagttgttttaagattttattaagttgatatcatttagatatcatttcaatcaataaaaaaagtcgaaaaaagttgaaaaatttcctaaacaaaatttaaaattggtcgaaaggtggttgcatttttcaatgaataacctaattacggaaaaagataataatattgtaagtgtgccgaacgtagaactagagatagccgcagacttgggcaactccaaattgaagatgatttttgatcgagatgaaaagtctattctccgagaaccatctgttatgagaagaatcattaaacaaccggaaattacagaaacaaatgaaaaaaagcttatggccaatatttttgatcaattgttcgcaaacgtttctagtccttctataaaaagagccggctctttcatggtcggaaagagggcattaacgtcaacaggtggaactcttcaaaacatgaatataaatcttggcaaaaagtataaagaggatctccccatcattaacttgctaacatatattgctgctaaagcaaccaaggatcattacgatgcaaattcagtaattccaagtgctttacatgtccattgcgatctatctactgcgataccggcttccgaatactcagttgaaaaagcggggatacttgaaggacgtttcaaaaaaggtgtccacactgtagtgctttatattggtgataaacaagtaacagtgcaaatctccttcaaatttgtaaaagtaacaagagaaggggttccatcgttatatgctatattggaaggccctaatgaatattttgaagaattcaatgagatataccaaaaagaaaatggaaagaaaatagatgggaatttcttcgcgaaaaaaaagattctccatgctgatattggcgatggaacaagtgagtatatttatactgaaggcatgaaacctatttcagatgcatgtactggggcaaggagaggtgtagggcatgcactcgaagaagcctctgaactgttaaaagaccaatttaatggaaatgtagaattaaatagacaacaacttgcggaaacactacgtaataagacggataaatattatattgaggcaagaaattgtatggatgaagcaataatttcacaagcaacgctaatccatgaggacattcaagagagatatatcagatacacatcttcacaagctgaaatatttgctgtttatggtggtggtagtgttacctttaaagacgagcttcataaggaattgaaggaatttgctgacgaagtgaaagcacaaatactatggattcccgaaaaacatgcagcggatatgaatgttcttggtcttaacataatgaataagcgtatcttcttaaaaacaaagaagaaattcaaaacagaaactaaaaaaaattagaggtatgatcctatgggaaaatataaagagccgcggaaaagttatctgtatcgaataaaagaagaggatcgagagcctgtaaatgagtggttagagagtcaatccaatatcgctgaatctttgactgttttgataagggcctccattgatcggttcggttctgaagctgatattacgtcttatgaaatcagaaaaaaaatcacgctagatacagaacgcttactgcatggagatttaccaggattaaattataattccaatatcggatcgcagactgaagaaacaccggctgaaacacaagaaacggaagcaccgaagaaaaccgtatctaatcttaatattgatgatgatgacgtaccagaactggattatgataatgcagtagatcctaatgatttttaatctttgcgaaaaagcctctttcatagaggctttttatacgaagaaattaagccactctaaactgaatatacacaaaaggaaacgataattgcactacaatcgccctcagcaacacactattttattccatcacattaaatatgattttatgttattatttcttttgagaccttggtctcaaaagaaatacaaagggggagttttctttatgaacgaagtatcgccaacagatcagcaaataacaattgaagatgtcacgtctgaactacataaagcctttgatatattcaacaatcatttttttgatggaatactccctgttccagctattacaatccaaacaaataagaataacaggaatgcaatgggatggtgttctactgtacctaactggggaacaaaagatggaaaacaccaaatgtatgaattgaatttggctgctgaatttctcgacttagatttctttgaaaccatggacactttgcttcatgagatggtccacttataccacaaagtaaaaggcattaaagacactagccgaaaaggcgaatatcacaacaaaatatttagagataaggtacttgaattagggtttgaatattcagaaaataaaccgcatccaagaatgggctggaccttcgctcgtataggtccggctttgaaagagcgtatatcaaaaatggatatcaaccagaaaatcttttctatatcaaaacgcggctatatgtattttcagttattagcagacggaaaaactcctgaacaagctgctcaaatctgcgaatcatcagagcagcaaccggctcttttaagaacaaaatctaaatctcataaatggttgtgccccaattgcgaagtaagagttatttcatataaggaaaatgtcaatattatatgtggagactgtaatgaaaccttagttaaacggtaatacacccctcctttataaatgacttatattccgttcagcactagagcatattgggtttaaatatgctctttttcagctggtctatatttattttgtgcaattgacggctaatccatcctgccggcgcctggtcggctccggaatccggttgcccccgcagcttcgatgagccgcagagatttcgcgacgcggcgctgccggtgctttcccgatcgccccgtaaacgcggggcgttttcaccttcagacgttctcctgcaggcgccgtatcggaaccgacggccgcggatctccttcagctgctagggcggcccgttgcctgacctggacacaaaaagccggcacctggccggctccggaatccggctgcctcacagcttcaataagccgcggagatttcacgacgcggcgccctgctgatgctctcccgatcgccccgtaaacgcggggggtttttgccttcagatactctcctgccggcgccgcatcggggccggcggccgcggatctccttcagcagccaggcattccgtcctggctatgacaaaaaagccggcacccggccggctcccgaatccggttgcccgcagcttcgatgagacgcggagatttcacgacgcggcgctgccggtacactcccgatcgcttcgtaaacgcggggcgttctcgccttagatgctctcctgccggcgccgcatcggaaccgacagccgcggatctccttcagcagccagggcggcccgtttcctgcctggacacaaaaaagccggcacccggccggctcccgaatccggctgcccccgcagcttcgatgaaccgcggagatttcacggcgcggcgctgccagtgctttcccaatcgcttcgtaaacgcggggcgttttcgccttctatgctctcctgcaggcgccatatcgggaccggcggccgcgtatctcgtttataagtattgcttcagaaaattagaagcgtagtaaggaaatttgcgttccgtgacctctaaaaaccgccggatcattacataatcatcgctgacatgctgcgtcagcagttcataccaccactccgtttcatatctcgcaatcattccgacattgtacaggaccaaataatgaataatcatttccggaagatgcaggaagtgatcgcgctgagagggaatataatattgattattctctaagtgaaacaataaatttggtgaagaccaaggttccctgtctatcggagcggcctcaaaaaccaaattcttatggtctttcctgacaaaagaccaattcaagtgatgactgatgtattctgcaaagcgggtgtcagacatattgtaatgaatcaccgcatgttcaggcactgaaataaggttatctttcagctctactttggtcagccaattctttttctcttggaaatggaatacagcatgcaattcaggaatggctgtcagcaattttttcattgtataccgttcttcctcaagaccggctattccgaataagtgtttcatcacatgaatacataaaccattgcgctgcaccttcacttcatcatccctaaaagagtaattttgctttttgcgttttcgggcagtcacgccatgtgcgagtactgaagcgtggcttggatagcttggatctgtggtcagaagacaggctttcagcaattgtgacatcccgtaaaacaacagaataggcttaatttctaaaggagaaagggatgcctgcttataaaaggactcggcgtgtttgatgaagaatatgaagcgctcactgtttttaaacgcataccgttttggttcttccattcctctttctgtatagactttatttagaaatttctgggaagattctacagaataaaataatgataactctttccattcaaggtctctcatatgtatttttaaaccctttcctttatctaaatatttcaactctttttcgcttccttgacatgccgttttctagttgataatctacatataatattttgccgaaaagagggggatttactaatgtgggaaagtaaattttcaaaagaaggcttaacgttcgatgatgtactgctcgtaccggctcaatcagacgtacttccgcgtgatgtggatttgtctgttgaactgacaaaaacgttaaagcttaatattcctgtcatcagtgcaggaatggatacagtaacagaatcagcaatggcgattgcgatggccagacaaggcggcttgggcattattcataaaaacatgtccatcgaacagcaggctgaacatgttgacaaagtcaaacgttctgaacggggcgttattacaaatcccttctttttaacacctgatcatcaagtattcgatgcggagcatttgatggggaaatacagaatttccggtgttccgatcgtagataataaagacgatcaaaagctggtcggtatcattacaaaccgcgatcttcgctttatctctgattattcaatgaaaatcagtgatgttatgacaaaagaagagctggttacggctcctgtgggaaccacattagacgaagcggaaaaaatcttgcagaagcataaaattgaaaaacttccattagtggatgaccaaaacaaattaaaaggtcttatcacgatcaaagatattgaaaaggttatcgaattcccgaattcatctaaagatgaacacggacgcctgatcgtcggcgctgcggtaggcgtgacaggtgatacaatgactcgtgtcagcaagcttgttgaagcgaatgtcgacgttatcgtggttgatacggctcacggacattccagaggcgtactgaacacagttgcgaaaatccgtgagacatatcctgaattgaacattatcgcaggaaatgttgctacggctgaagcgacaaaggctttgattgaagccggagcaaacattgtaaaagtgggaatcggacctggatctatctgtacgacacgcgtcgttgcaggcgtaggtgtaccgcaaatcactgcgatttatgattgtgccactgaagcgagaaaacacggcgcaacaattatcgcggacggcggtattaaattctccggagatattacgaaagcattggcatccggcggacatgctgtcatgcttggaagcctgcttgccggtacttcagaaagcccgggcgaaactgaaatctatcaaggcagaagatttaaagtgtatcgcggtatgggttctgtcgctgccatggaaaaaggcagtaaagaccgatatttccaagaagaaaataagaaattcgtccctgaaggtatcgaaggacggactccgtacaaaggtcctgtagaagaaacagtgtatcagcttgtcggcggtcttcgttcaggtatgggatattgcggttcaaaagacttgcgcgctttaagagaagaagctcaatttatccgtatgacaggagcaggtcttcgcgaaagccatccgcatgatgtccaaatcacgaaggaatcaccaaactacacaatctcataattgttacaaataaaaaacatttgacagggtcgctgactctgtctattttttttatatcgagtgtgataaaatttataatgttgtgttttgaatttgaatatgtccttaacggcttaattatagatttaaaatgaatgacggaggtcgtaagattgaacatcacgaaatggaaacagatgttggtgtcattagtggtactggcactgaccgcaacttgctttgttccgatgtctaaagcggaagcagccggcaatgacccgattgatgtcaatgcatcagctgcgataatgattgaggcttcatcggggaaaattttatacagtaaaaatgcagacaaaagattgccgattgccagcatgacaaaaatgatgactgaatatctgcttctggaagccattaaagaaggaaaagtgaaatgggaccaaacgtatactcctgatgattatgtctatgaaatctctcaagacaacagtttatcaaacgtccctctccggaaagacggcaaatacacagtcaaagaactgtaccaagctatggcgatttactctgctaacggagccgcgatcgctgttgccgaaattcttgccggaactgaaacaaaatttgtcgccaaaatgaatgcgaaagccaaagaactaggcatgacaaactatgactttaaaaattccaccggtcttgtgaatgaagaccttcacggcaaacagccgcaaggggaaggcgttaaagaagagagtgaagtttctgctaaagacatggcgcttcttgcagaccgcctgatcactgattatccggaagttctgaaaacaacaagcattgctaagacgaaattcagagcgggcacagatgatgaaatggacatgccgaactggaacttcatgttaaaaggccttgtttctgaatatcccggcgttgacggcttaaaaacaggttctactgattctgcgggatcttgttttacaagcaccgcacagcggaacggaatgcgggtcatcaccgttgtattaaacgcaaaaggcaacctgcataccggacgttttgatgaaaccaaaaaaatgctcgattacgcatttaacagcaatttctcaatgaaagatctttaccctgaaggctctcaagtaaaagggcacaaaacgattgacgttgacaaagggaaagacaagcaagtcgatattgttactgataaggcactttctattcctgtgaaaagcggggatgaaaagaactataaagctgaagtgactttagataaaaaagaaatcacggctcctgtgaaaaaagggacgaaagtcggaacgctgacagttacatacaaaggcagtgacaaagactacggcttcctcaaatccaaagagttcagcgtgaatcttgtaacgaaaaatgatgtagataaagcaaactggtttgttcagatgatgcgcggcatcggaggcttcttctccggaatctggaacagtgccgttgatacggtaacaggctggttttaagaaataagaaagagctctgatgaaagttagggctcttttgcttaatatactgaaaaaaccaaattgttagtaaaaaaatgatatctatctctttcatctcgctgtaaaatgagaatatccatatgaaatattgtatttctgggatacaataagagatagaaattatctaatcatacattgactagggggaccaaataatggctcaaacaggtactgaccgtgtaaaacgcggaatggcggaaatgcaaaaaggcggcgtcatcatggacgttgtaaatgctgaacaagcgaagattgccgaagaggcgggagctgttgccgtaatggcgttagaacgtgttccggctgatattcgcgctgccggcggtgttgcccgcatggctgacccgacgatcgttgaagaagtaatgaatgctgtatccattcccgtaatggcaaaagcgcgtatcggacatatcgttgaagcgcgtgtccttgaagcaatgggagtagattatatcgatgaaagtgaagtcctgactcctgctgacgaagaatttcatttaaataaaaatgaatatactgttccgttcgtatgtggatgccgtgatcttggcgaagcaacgcgccgtatcgctgaaggagcgtccatgcttcgtacaaaaggcgaaccgggaacaggaaacattgtggaagctgtccgccatatgagaaaagtaaacgcgcaagtgcgcaaagttgtggcgatgagcaatgatgagctgatgactgaagctaaaaacctcggtgctccttatgaactgcttcttcaaattaagcgtgacggcaaattgcctgttgtcaactttgctgccggcggagtggcgacgcctgctgatgcggcattgatgatgcagcttggcgctgatggcgtatttgtcggttcaggtattttcaaatcggacaatcctgctaaattcgctaaagcaattgttgaagcaacgactcactacacagattacaaactgattgctgagctttctaaagaattgggcacagcaatgaaaggaatcgaaatctcaaatctattgccggaacagcgtatgcaagaacgcggctggtaaaaccataggagagctggaagcatgttaacaattggtgtacttggacttcaaggagcagtaagagaacatattcgttcaattgaagcatgtggttcaaaaggtgtcgtgattaagcgtcctgaacagctgaatgacatcgacggcttaatcctgccgggcggggaaagcacgactatgcggcgtttaatggatacgtatcattttatggagccgcttcgcgagtttgccgcccagggaaaaccgatgttcggcacatgcgccggtctgattatcttagccaaagagattgcgggaacggataatgctcatttagggctgttaaacgttgttgtcgagcgtaattcttttggccgtcaggtcgacagctttgaggctgatctaacgattaaaggccttgatgagccgtttactggtgtatttattcgcgcgccgcatattttagaagccggagaagatgttgaagtgctttgtgaacataacggacgcatcgtggctgcaaaacaaggccatttcctcggctgctcgttccatcctgaattgacggatgatcaccgagtgacagagctgtttgtgaaaatggcggaaaagcataagcaggaaacagctgtataaaacagttgaaaaccgctgatacttatagtacattataaacacaaataaagatcgaaaagcgttgacaggaagcagtaggaagcccctctttcaaagagagccgatgggtggtgcgaatcggtgaaagatgctctccgaatccgtccttgagcgaaatgctgaaaacaagtaggcatttacgggaaaaccgttatgggttaaagcgggaagcaagtgtgagcttgttttcaatcagggtggcaacgcgagagctctcgtcccttttaggggatgagggctcttttttattttcgataaaaacagataggagttgttaggcatgattgacacgaaggtgctgagagccaattttcaagaagtaaaagcgaagctcattccaaaaggcgaagacttatctgactttgataagtttgaagagcttgatgaaaaaagaagagagcttatcgggaaagtagaagagctgaagggaaaacgcaatgaagtttctcagcaggtcgccgttttgaagcgggagaaaaaagacgctgatcatattattaaagagatgcgtgaagtaggcgaagaaattaagaagcttgatgaagagcttcgcacggttgaaacgacactcgaaaccatccttctgtctattccgaacatcccgcacgattcagtgcctgtcggggaaacagaagatgataacattgaaattcgcaagtggggagaggcaccggcattttcttatgagccgaaaccgcattgggatatcgctgaccacctgaacattcttgattttgaacgcgcttcaaaagtaacgggaagccggtttgtgttttataaaggattaggggcccgtctcgaacgcgcactctacaactttatgctcgatcttcacgttgacgaatatcattacacggaagtcattcctccttatatggtaaaccgtacgagcatgacaggtacggggcagcttcctaaatttgaagaggatgcttttaaaatcagggaagaggattatttcttaattccgacggcggaagtgccgattacaaatatgcatcgcgatgaaatcttatccgatgatgcattgccgatcaattatgcggcgttcagcgcttgcttccgttcagaagcgggatctgccggccgtgatacacgcggtttgatccgccagcatcaattcaacaaggttgagcttgtgaaattcgtgaagccggaagattcttatgaggagcttgagaaattgacaaatcaagctgagcgggtgcttcagctgctcgaacttccgtatcgtgtcatgagcatgtgtaccggtgatctgggctttacagctgcgaaaaagtacgatattgaggtatggattccaagccaagacacataccgtgaaatttcttcttgcagcaactttgaagcgttccaggcaagacgagcaaacattcgattcagacgcgaagcgaaaggcaagcctgagcatgtgcatacgttaaacggttcaggtctggcagtcggcagaacagtagctgccatcttggaaaactaccagcaggaagacggaagtgtcgtcattccggaagtgcttcgtccttatatgggaaataaagaagtcatcaaaccgtaaaaggtgcgccctagaggcgcgccttttttgctgtttggtataaagcggcgacattccgggctgtgctttcaaggttaaaacggcctgattctaaagcatcttcaagacttacagcgccaggcacgatagaaaacacagcggtgattcctctgttgtatacatgttcaaagtctttgcctaaggaacccgccaatgcgataacgggaatttcttgagcggatgcgcgtgcggcgattcccgcgggggttttgccgaatatcgtttgtccgtcaatctgtccctctccggtgattacaaggtcagcgccttttatctgatctgaaaaggacagtgtatctaatacaacgtcgatacctctttgaagttctgcttgtaagaaggcaatcagtcctgcccctaaacctcctgcggcacccgcaccttttacagaatccgcttcaatatcgtgttgccgtctcaatacatcagcgaaatggcgcaaattgctatccaataccatttttgtctcctcggacgcccctttttgcgggccaaagacatatgacgccccattttcgccggtcaggggattttcgacatcgcaggcggcacgaatacgaatgtgcttcaggtcaggggagagaccgcttatatcaatagaagccagggtgtgcaaagagcctccgccgtcaggtatctcctgaccttcctcatttaagaaacgcacaccgagcgcactcgccattcctgtcccggcgtcattggtggcgcttcccccaagaccgattatgatctcactcgccccgcgggaagctgcatctgctatcagttcacccgttcctcttgtggtcgtgttcaacggatctctgagatgacggggaacgagatggagtcccgaagcttccgccatttcaatgactgccgtgcgcccgtctcccagaagtccgtatgcggcaattaccggtgttcccagcgggccggtcacagtttttttgataatgcttccgccggtggcatccgttaaagcctgaacggttccttctccgccgtcagccacgggtatcttgatatattccgcgtcagggaagaccgctttgaatcctttctcgatgctgtcggcggcttcttttgatgtcatgctttctttaaaagaatccggtgcaattatgactttcattgtgttctccacctttatgagcaggtttatctatttcaatctattcttggttttcactgtttttcctgcccgtatgacatactgaggttgatttggagacaagacttttgtatgatagtaaagctgacggaaaagccgtttaagaaaagaaataaaaaaatatgaaaaagcgcttgactgaaatttaggtcatgtggtatattattaaatgtcgatacggaggaatacccaagtccggctgaagggatcggtcttgaaaaccgacaggggtgtcaaagcccgcgggggttcgaatccctcttcctccgccatattgattttaaacctaatgaaactcgagcatatattggagattgttttgtccgctgcatttgatgcagcggattttttatatgcaaaaaagcgattttctcttttggggaaaatcgctttattatttttatttctttctgttttcattgatcacgtgactgattttttcgatcaaaggttccagtgactgttcatcagcttcaagatcataatcttcaatgcgtactttcagcacagggcaggcgttaaaaccgctgatccagtcctcgtaccgcgtatacatctcttcccaataggcacggttggtctgcagctccatctcacggccccgcttttcaatccgctctataatgttttcaagatcgccttctaaatagatcaaaacatcaggatgcgggaagtatggcgtcatgaccatggcctcaaaaaggcttgtgtatgttttgtaatctgtcagcgacatggttcctttatcggcatgcatttttgcgaatatgcctgtatcttcataaatcgaacggtcctgcacgaatcctccgcctgattcaaacatgtttttctgctccttgaaccgctcggccagaaaataaatttgcaaatgaaagctccagcgttcaaagtcatgataaaacttctctaaataagggttttcatccacttcttcaagtgaggtattaaacccgaggcgttttgctaaagctttggttaaagtcgattttccgactcctaccgttcccgctactgttataatggcgttgtttggaatgtgaatatctttcatttaataagctcctttacctgacgggcaattctttcatagtctgtcttattcaaaacaaagtcttcagtatcaccatcaatagtcagtacagatatatccggatcttcttcctgaagctgtctgatggcggtatcgtaatctgcaatgagacgttccagatattgatgttcgatatttttctcaaacgggcgcccgcgtttttcgatgcgttgaagcaatgtcggcaggcttgcctttatgtatacaatgacattcggcttcggcaagtcgtgagtgagcagatgataaatctgcttatatttctcaagcttttgtccgtgcaatgtgcgttctgcgaaaataacatttttataaatatgataatcggacaaaacgggctgtccttgttttaaataatcccgatcagtgtcttcaagctgtttatacctgtgacagagaaaaaacatttcaagctgaaaactccactcctcgatattatcatagaacttatcgagatacgggttgtcttccacaatctcattaatcataggaaaaccgagctcttcagaaagcatagaagcgagtgtcgtttttcctgccccgataggaccttctaccgcgataaaaggggctctgttcattgaaaatcctccttaattctgcaaacatccgtcagctgccggcctttatattgtatcacactctcagaaacgcccatgaaaaaaagacgcttccaattaacgaaacgtctctttcacaatatggaattgatctccgagcaaaagccagttttgcgggaaggagaggccgagtttccaatagctgattcctcttaaatgaagttctttaattaaattaaatttcgcctgaatggagcgggcgtcttcaaaccatacttcatgctgtttctgattttcagccgtgtatcgaaagaagggagcctgggcggtttcgttatattgaatgtcgactttatagcgtgcggccagagcgatcgcctgctgaggactgacggctttcgctgtcgttccctgtttaaaaggcagtgtccaatcgtagccgtacatgttctgtcccatgacgattttggaagaaggcatttctgtcagcgcgtactcaatgacattccttacagggccgattggtgatacggcctgagccgggcctccgctgtacccccactcatatgtcatgatcacgacaaaatcgacgatttctccatgtgccctatagtcatgtgcttcataccatttgccggcctgggtcgcactcgttttcggagcaagcgccgttgaaatcttccagccttcccgatgaaaaatcgttctcgcttcacgtaaaaaacgattgtaggcttctctgtcctgaggacgcaaatattcgaaatcaaaatgaatatcgcggaagccgtgctttttggccgtggagacgatttcctgaaagagctttgttttcaccgtattatcatttaagatgagccgcccgagttcatcgctgaatgcgtcattttcaaggttggtgatgatcatcatcaatgtggtgttgtgcctgtcggcgatactttttaaattggtcaggggcggttcttttaaagtcccgttccgctgcacctgaaaactgaatgcgccgaggtatgttaaataaggtgaggcctctcttgctgcctgctgcagattagcgcttacgctcgttccccgcggttctatatatgcatttgattcgatatcgggcttattcgtctgctccggaatatacaggcgggtcccgacttgcactgtggagctgagctgaattccgttcaccctcgcaagctccgcggccgatatatgaaaacggccggcgattgccgcaagagtatcgccttgtctcacctcgtaatattgtccctcgatcggaatgacaagggtttgtccgacaaccaatgtattgggattaggcagtttatttgcttccgcaatgacatttgcggcaatccggtagcgcgccgcaatagcagaaagtgtgtcgccccgtttcactacataaatctgaatgaaaaacgcctcctttcatatccgctatcaaatgtatgaaaaaaggaggctgatcatgtttatttttcggaggtaatttgtttttcggtggttatttccgcgaagagtacattttccatcatggtcaaagcgaaatcattgtcttcgtcgttattggaagcggtgcagtctttcgggatggcaatgctgtattcccgcatataagcgtcgttagccgtgaacagcacgcaaatattaccggcaatccccgtgatcattaattgattcacttttaattcggtcagaagggtgtgaagcgccgtttcgtaaaatgcggaatgcttcggtttaatcagaaaataatcatccggctgaggtgaaatatcttctataatgtcggcgcttatgtcattgctgcattcctccctgatggcatcaatatcagccttccaaagcccgtaatgatcattaatataaataatcggccagttgttttgttttgcatgcttctttaatgataaaatacgggggacaatttgtttggttttttcagcaagacgttcgcccatatcaaattgaaaattattgatcatatcgacaatcagaagggctgtgttgttaggttcagtcaataccggcaactcctttctgctgaggtattcttattttaacctttatgagacatgaaaaaacttaagaagagagcttgaaccgatgaatgatgaatattatatgagagaagccataaaagaagcgaagaaagcagaagcgaaaggggaagtgccgatcggagccgtccttgttctgcacgatgagatcgtggcgcgggcgcataatctgcgggagacggaacagcgctcacttgcccacgcggaaatgctggcgatagacgaagcgtgccgcaagctgggaacatggagacttgaggacgccgttctttatgtcactttagagccgtgcccgatgtgtgcgggagccgtcgtgctttccagagtcgataaggtcgtgttcggcgcatttgatcccaagggaggctgtacaggaacgctgatgaaccttttgcaggaggaacggttcaaccaccaagcggaagtggtgagcggagtgctcgaagaagagtgcggagaaatgctcagcgcttttttcagaaagctgcgccggcaaaagaaagataagaggaaaaagttgtctgattagtacggttgcattttctgcctgaagcagatatacttatgtgtgcatcataaatggtgcgcatataaaaatttgatatttattttgccgtgctaagcggggaggtagcggtgccctgtacccgcaatccgctctagcggggccgaatcccttcacgaggttcgtttactgtaaggcctgccttaagtaagtggcgttgacgtctgggtcctgcgcaatgggaattcatgaaccatgtcaggtccggaaggaagcagcattaagtgaaacctctcatgtgccgcagggttgcctgggctgagctaactgcttaagtaacgcttagggtagcgaatcgacagaaggtgcacggtaaatcaatcatcaaatttcagactcacctgtttatggcaggtgagttttttcgtatatgaaaaacgggttttggcgttaaaagcccgttcatgtataataaacatgatgaataacagaggagggcgcatcctgtgggttaccaagctttatatcgagtatttaggcctcagcagtttgaagatgtggtcggacaggaacacattacgaaaacgctgcaaaatgcccttttgcaaaagaaattttctcatgcatatctgttttctggaccacgaggaacgggaaaaaccagtgcagctaaaatatttgcgaaagcagtcaactgtgagcacgcccctgtagaagaaccgtgcaatgaatgcgcggcgtgcaaggggatcacaaacggctctatatcagatgtgatcgaaatagatgcggcgtcgaataacggcgtagacgaaatccgcgacatccgtgacaaagtaaaattcgccccgtcggccgtcacttacaaggtatatattatagatgaggtgcatatgctctctatcggcgcattcaacgcgcttctgaaaacgctggaagaaccgccggcacattgcattttcatattagctacgactgagcctcataagattcctttaaccattatctccagatgtcagcgttttgacttcaaacggattacatcccaagcaattgtcggacgaatgaagataatcgtcgatgcagagcagctgaaggtggaagaaggcgcccttgatatcatagcgagtgctgcggacgggggaatgagggacgcgctgagcctgctcgatcaagccgtatcattcagcggcgatgagctggcggtggatgacgcattgctcattaccggggccgtttcccagcactatattggaaaactggcatccgctcttcaccgcaaacaggtttccgaggcgttggaaacactgaatgaattactccagcaggggaaagatgcggccaaactgattgaagatatgatcttttatttcagggatatgctcttgtaccaggctgctcccgatttagaaggagtcctggagaaggtgaaggtcgatgaaatgttccgggatctgagcggtgaaataccggcccccgctttatatgagatgattgatatcctgaataaaagccatcaggaaatgaagtggacgaaccacccaagaatcttttttgaagtggctgtcgtgaaaatatgccagacggcgcagcagtccggcgcagacatccctgaggtcggcatgctgatgaataagatccagcagcttgagcaggaagtggaaaggctgaaaacctccggtgtgaaagttcaggcggaaagcgctccgaaagaagccccgcgtcctcaaaaaggcggaaaaagccattacaaagctccggtcggacgaatccatgaaatattgaaggaagccacaagacctgaccttgaacagcttaaaagcagctggggcaagctgctggcacacctgaaacagcagaataaggtgtcccatgcggctcttttgaatgacagtgaaccggtggccgctgcccagaaggcatttgtgcttaaatttaaatacgaaatccattgtaaaatggttgccgaagacaataacggagtccgtacgaatcttgaacagattctcgaatcaatgctcgggaaaagaatggatttgattggcgttccggaagcacaatggggtaaaataagagaagaatttttaaatgatcatcagcaggaaagtgaaggatcaaacgaaccggctgaagaagatccgcttattgcagaggcgaaaaaacttgtcggagcggatttaatcgaaataaaagactaatgagatgaaagagagtgattgaatatgcgtggcggaatgggaaacatgcaaaaaatgatgaaacagatgcaaaaaatgcaaaaggatatggctaaggctcaggaggagcttgctgaaaaagtgcttgaaggcacagcgggcggcggaatggtgactgtaaaggttaacggtcaaaaagaagttgtagacgttgcgattaaagaagaagttgttgatccggaagacatcgaaatgcttcaggacctggttcttgctgcgacaaacgacgccctcaaaaaagtggatgacatgacgaatgagacaatgggacaatttacaaaaggaatgaacataccgggtttattctagggggataaataaacatgcagtatcctgaaccaatatcaaagctgattgacagctttatgaaattgccagggatcggaccgaaaacagcggttcgtctggctttttttgttctaggtatgaaagaagacacagtattggattttgctaaggcgcttgtcaatgcgaagcggaatctgacatattgctcgatttgcggacatattacagatcaggacccttgttatatatgcgaggatacaagaagagataagtctgttatttgtgtcgtgcaggaccctaaagatgttattgcaatggagaaaatgaaggaatataacggccagtatcatgtgcttcacggcgcgatttctccaatggacggcatcggcccggaggatattaagattccggaactgctgaagcgccttcaggatgaccaagtgacagaagttattctcgcaaccaaccctaatattgaaggggaagcaacagcgatgtatatatcgaggctgttaaagccctcaggcatcaagctctcccgtattgcccacggcctgcccgtcggcggcgatttggaatatgctgatgaggtcactctttcaaaagcgcttgaaggaagacgtgaattgtaagggaggaaatggcgaggcatgggttttcttcgcagaaatacattaagaaaagagtttgacgaaaagctgattgaacagctctttaaacaaaaggaagaatggaacagacagaagagtctggtcgataaaagtcttgagccctcggctgaggtgctgtttgagctgaaagtcgctgaatctaagtattttttttatttgaaagaagcgaagcagcggaatttaaaaatgagcaggtggaagtaagaggtctattctccgggatcttctcataagcttgtactaaacaagcgagggggaagattcatggagccttttttcattatcggtttaattgtcggtctggttgctttgctttttttatggggagtatctccaaagccagtaagatggattggtttgactgccattaagtttattgctggtgcgattcttctggtgggtgtgaatttgttcggcgggagtctcggcattcatattcctgttaatctggttacaaccggtgtcagcgggattttaggaatccccggcatcgctgctttaatcgtcattaaacgcttcatcatttaatttgtcgattattgttgacatgatggatgaagggtgatattctaatatacgtcgctgatgacgaaacagattctcgaaaaaagaatttaaaaaagttattgacgatgataacaacgatatgatataataattaagtcgcttcgagagaagtgttgtaagaattattgattgagtacgacataaacctagttatagtagaccttgatattcaaattcttcgtaccatctcccaaatcctcgaccgtatacgttacatgactaatgagcatctttagtattaagtttatttcagagttagacatcccgtcagtagactcaatcatctcctgcactttatgatgactccatttttctttttttgtctcagcgctaagagcattttgaaactcagtagatgcaattaattctgctaattcattttcagctttttgaagtgtctcttgtgaaattttcagcttttctttgtactctgttttactgatgtccccatctaagtacatttcctttatgcgttctattcttccctttgcctttttaacagctttttctcttaaaccaataagctgagctgtataagagtcatcattaacatcttgctcagtaggggagaagagagattcattgtatttttttatttccttcataattgactggaacagtacttcttcatgaattccttttgtttcttcgcattcttttgttctttcagcagattttcgtaaacactttctaacgtgttttcttctgcctttgggttgttctatagcttgtgctttatgacaataaggacatctaacaataccagaaagcctgtgggtattcatatttaaacgtcttccagccactttatatgttctaagtttttctattctattcaggattagggcatgttcttcatcggttttcatggtttcatgatgaccttttgcaattaatacttcatctagatttttattttgaacaatactgttgttgcttttgcttttcttgtatttaccaaaccatacataacccctatgaaaatcgttggacagaatttctgaaacaacttctccgtaccaaatggaacggccggatggggaagggactttcagttcgtttaacatctcagcaattactgtgcaagaatattcctcttctaagaaccatttaatcatcattctatatatttttttcttttcctcaacaactactgcagctttgagattcttgtcccacttataaccgtatggaacagaccctgaatgcagtctgccttctcttgtggcatttttctttccgttaatcgttctccgttttattgctctatattcacttcgagcaataattgattcaaactcagaaagcatttcgtcgccttcgattgataaatcataggttttttttggtgtaataaacaatgtcccactttgcttaaatgcttcaagtatacgtccggaatcaatttgtgatcctctagagagtctgtccattgctacagcacagactgcatcaaactcaccattttcgattcttggcaacaataatgaaaacattggtcgttcatcaatagtctcacctgagacaacttcctcaaaccactgaacatttttaaagttctctctttttatgagatattctagctcatttctatgtttggcgagtgtatcttctgaatctctgtcttctctggattttcttgaataaactgctattcttgaattttcgtgtaacgccaagtatttcatcctttcttcttattgtaagtgtagttagattatatcatgtgcattggaatttctttataaaatcctcattttaacgaaatattttagatcaacttgcttattaatctaatttaaagtatcctaattgatgtatcatagggggtttaatcagccactatagaccacagagtccctcacacgctctgtggttttttgtttagattggaatatacccaaatgaaaaaagaagcctcagagggcttcaaattgattaattcttctcacatgcaaagttgtcattatcccgatccatcttagatgtataagcagggtgagtgcttggtactccatgcggatatttctttctcagctctgtgcagtttgcaaagtgttctgttcctccagtagaaggggaggcttgtgtagagttagaagagctacttgatgctgaactacttgaatgggaactgcttgagttcgatttatgtgtctcagattgatgtgttgtaactgacttttgagccggcttagatacacttactgatttcttcggtttagttacgcagccattaaatcctttatcagttgcatagtcattcttactccaaatcttcaagtctttatctttcgcagcttgctcatctttcttatacgtgtctaaatacttcgtgtttggctcatatacataagctactcgtgctaatccttctttaagcagtgtttcttgtactgatttgccatctgcgtaaacgtaagccagcattctgccatacttgtctgtacgatctcctttatcaaactccagttgaagttttcccttgttaaccagctgtttgtttcttgctgaagcatcctcaccatatggttgcacacaagagtatggtttcttagtttcaggcgtgtcaacaagcaaataacgaacagttttgacctcgcctttatagttaactttaatcgtgtccccatcaaccgttctgtttaatgttacatcgaccagctttttcttattgtcagatgcctttttatccgacgaactcttctttgaagcatcttcggctttttcattcttgccatcacttttgttgtttgattgattctctttcttttgtgttgtctctttttcactcttttcttcttgctgcgttgttttagctttatctgaatctgatttatctgtagaagcagagtcagatccacacgcagccaaagaaaaacttagagataatgcaccaatgcctaataaccatttcttcaatgtaattcccccaaattgtttgttctgtctttatatcggacaaaccttcctaattataattatagaaccaaagattgtaaatttaattttagataaacatctgattttgaaaatcgaagaacctaaaactatggtaaaatttagataagattaagtgggaaggagacaggtatgcaagtatttgaagcatcctcgttaatctcagcagcggaaaagcgggcaaaagaatacgatcagattagagaacaatttatcaatctcagaaaagcatttcaaggaatggctgatttagatgacagcgagttttcaggtaaaggtgctgataacattaaagcattcttccaagatcacgctggtgttacagacagctggcttgatctgatcgatatgaagattgcttttcttaacagtatttcaggaaaagtagctgatgccggattagccgattcgtttgtggaagagtcatttttagagcatgagttgattcatgcgaagaataagtcaaaagccatcatgcaagagcaacggaatgaaatgagggatattcttaatgagataagtgatattgttcatcttgatgttttctctacagaggatgtcgatcaaaagctggattcagcagataagaaacgggacaataccatacacaagctcggaaagctcgatcatgatctaacgaaggaatatgcagaaaccgaagcgaacgagcatttcatccaagccgactttcaacagcttcaaaatgccacgggtaaagggaaaaacgcaacaccacttcactataacgccaaggcgtacagagaaagtgacatacataagaaaaaaggcgagattgcaagacattcggatgcttatttgacgattaaaaaggaagaagcgaaagagcgggaaatcaaggatctgaagaaaaagctcgctgacggtgtgaccgatccggatgaatatttagaaatcgcgaagaagatcggctatgaaaaccttgaaccttcccaacaacaatatgtgatgcaacttgaacaagcaaaacagatggaagaagccggagaagtgacttgggatattttaaaaggagccggcgttggtttatatgatgtcgggaaagacacggtaacaggtttatggcagctgatcagcaagcctgatgaagttgttgaaggtatcataggggcagttgctcatccgattaacacgtataattccatttcaacagctattgaggaatcgtatcaaaaagatatggtaaatggagatgcttactccagatcaagatgggtgacatatgcgataggtacggtagttacctctgtagtaggcacaaagggagccggttctcttacaaaagctgacgtagcaggaaaagtcacctctaaagtcagtaaagcaggccaaaagctgaaagatgtctcaattgctgatttattgccttataatccacgttacgatgttgttccggctggaggagttccttataatgtagttaacggtgagaatttaaaggatcgtctgcttcagttaataaagtctgccaatcctagaacaaggttgcctagaaatcatgggagatgggaagggactcctggtaacggtaaatggcactcagatagacctgacgttaatgcagttactaaaggagaacccgtcacttttatagatggcagaccgatttttacaccatggagcaaagggacgattaagtttaaatcaggagaactgaaaggtactaaaaaggattttccagcagtttataaacgtattcaaaaaatgaaaggctttaaaacccaaaaagaagctgaaaaatggctgaaagaagtagttagattaacaccgcatcatttagacaataacaccatccaattaatccctatggatttacatggtaatatacctcacgtaggttcggcatctgatttaagaggaggattttaatgagcatacaggcaatcaagaaaaaaatgagtgaattttatttagatataagaattgataagaacataaactctcatcaagtccttaaaaaatttgaggacgaaaattctttcgacataacagatgattataaagagtttctcaatttatatggggaatgctggatagaggaagataatgtgtttttccctgttttagaggacaatccactagcagataacggtaatctccggttaggatatttctacggtcttaataacaatgatgctaatattatcaaattaaaagagaatctttcagaacaaatgccggactggattataccgattgctgatggtgacggaggagatcaaatttgtcttggtgtgaaaggagaagcagcaggaaaagtttatttttgggatcatgaattgacaaatggagtaaaagacacatttttggtcgcaaactctttctctgacttcattcaaagtctgtttatagaagaggcaacagatggggacgatgaagacgatggtattttatctattgagctagatgatgatttattaaacagttaagcaaaagtattgcaattgtatgagatgatgcaaaagtaagcattcgtaatcaaaataaaataatggttttttccataaacaaagtattgcaaattatttcaatggtttcacttaatgtgttataatcagaactgtaagatatttgatcggttacagtgtatttctttcataagaaatgcataaaataaaaagaccagggtgttggtagcaccccggctctgtacgaaaagctgcccatcaaagggcttgctcgatgttgaatctgcgtagacctaaccctttaaggttcctaagctcaagggaaggtctattttttcttttggcttgacgttacaatcatcattatattgaagatcaacaagacggtatttaatatcaatccgccaaaattgatcattatcattaatgattcgtaaacagtcattttcccaccccctttctataggggatgagcaagactcccttgagtgagcatgcttcaatgtacaggaatcattatacactaattccaaatatatgtctgtgattatagcaattatattgccaaggtgaatcagtcacttgagcatcaaagtttaatgattaggacaatatcatgtaatctttattgtgtaagtgcatctgggatattataattttaaattgttgaaattaactaagggagaatctgacgttggaatttactttagctaaacaggttttaaagttttcattaacaagtggcaaaagggcagaaataaatgtgccaccagtgctcaataaacaagacattaagatattaaaaagtcaattaattgttatggagatgcaaacaaaaatatctaatgaagatatgaaaagaaaaaggattagaaaaacgaaaataagcaggctataaaaatagcccgtcatttgcgtgatccgaaagaaaagcaatactttgtgccggagtttttaagtgtgaaaataaattactatgtccccccttacaagcatacattgtgatatgtaagggggggatttttcttgcctagataccggagcgctcttcgcaagagagggcctttgccttttcggtatgtgcttcttctgtcgtttgcttttttcaccatatcgacggtcattagcctttggatgatcaactcctcaatcaaaccggtgctgatgaacataggagaaatggaaaccaaacgggtggcgacagaggtcattacggaatccattgaagaatacatgtctcacagtgacaatgtgaaagatatggtcgatatgaaaacggatgaaaacggaaaagtcacaacgatggattttaatacacaaatggtcaacagtatgaaggcgaaagtgacaaagcagctccaggctcatctgaaggaagtggagtcgaacaataagcagcatgaaacagaaaaaggcgcgaaaacggccgatgcaattatgattgatattcctttagggcaggtcacgggaaacagcattctcggaaatctggggccgaaaatccccgtgcgctttaacctgatcggtgatgcgttaactgatgtgaaaacaaaaataaagccgtacggcattaacaatgccctgatcgatatcagtatttttgtggaaattaaagtgaaggtcattattccgtttgccagtaagacatcagtcgtcacaaataatattccggtctccattaaagcgattcaaggagaggtgccgcagttttataacggaagcggcggatcaggtgtgacgccttccgtccagttgccgaatgaaaaaaaggagaaagacaaataaagacacacagccgcattttcttctggcggctgtttttactttttcctgtggatttcttgaaactgaactcaaagtatcgactagagaagctcataaagcttagtggatacttgctgaataatcatttccaacaattacatcgaacgattgttcctgtttatattgaataaagaacgtttgttctgttaatattagatcaataaaggagtgattcaaaatgcttagagatcgaggagcgatcaaatggacttccatgatgcttccagaacatttaacgcaattaaaacaggacttgttagatgtttcgaaaatggagaagccatctttagatgaacagcaaattgaggagattgacatcttggtttctgaagcaatggcattcaataaagaactgaagtttaaactctttaaagaaggaattgccgaggatttaatcggtacagttcaatatctcaattacgaacaacacaaattacatgtaaaagatcatcacgatcaaaccgtatacatcaccatgaatgacatcataggagttgcttacaatgattgattactcacagtttccacgtaaaaatatactttgtgtagatatgaaatccttttatgcttcagtatcgatgtattcatctgaaaaagattataccattctcgaagacaaaaccgcaacaggtaaaaagcgggattggaaagggaaaaagagacggacgaatcttatggcagagcattatgaggcgttgcagaagaaaatcggagcaccttactatggcaagaaagctgaaaagctaagtggttgtgcagagtgtctttcgtttaaaagagatccggagacggacaaactaaagctgtatcaagcccatttttgcaaagtgaggttatgccctatgtgtgcgtggcgccggtcgttaaaaattgcttatcataataaattgattgtagaggaagccaaccggcagtacggttgcggatggatttttctcacgctgaccgtcagaaatgtagcaggagaagagctgaagcctaagatttctgacatgatgaaagggtttaatcggctcatgaaatacaaaagggtcgatacagctgtacttggctattttagagctttagagattacgaaaaatcatgaagaagatacatatcatccgcattttcatgtgttattgcctgtgaagagaagttatttcggcaaaaattatatcaagcaggcggaatggacaagcctttggaaaagggcgatgaaactggactacacgccgattgttgatatacgaagagtcaagggaagagctaaaattgatgctgagcagatcgagagcgatgtgcgggaagccatgatggagcaaaaagcagttttggagatttctaagtatccagtgaaagataccgatgttgtgcgcggcggcaaggtgacggaagacaatctgaacacggtgttttatttagatgatgcgctttctgcccgccggcttattggctatggcggcattttgaaggaaattcataaggagctgaaccttggtgatgcggaggacggcgatcttgtcaagatcgaggaagaggatgacgaggtggcgaatgaagcatttgaggtaatggcttactggcatccaggcattaaaaattacataatcaaataaaaagcagaccgattgatggtctgcttttttgtattactagctcgggaacgtttggtagaaagcaacaatgccgatcacgcttagcacaactaggattcctagaatgctccacaatgttacttttacacgtttagacataccatgacctcactttttaggctcaatcaacggtgaattttttgtaagtgcgttttccatttttatcgccgacggctttgataaatacgttacctagagtgataccgatgtctttgattggcccgatttgataatagaaacttcctgaaactgctgctttgttatcgcctgtaacccaagcgttcttgccgcctgtgtttaagcctgttcttactactggattcaagttgcggactactcttgcatttgaagagttgatctttttcacttttccaccagatacattgtagttaacggaaactttgtaagtagtctgttttactccgaaaaacttaactgagttctcgtaagaaacgcctttgtcccccatagcattgattgggtcatcaacaacaatttcgttttcttctatgttgataggatcgatctttgtaaagctttccacaaacttttcctgatcttcttttgataaggctttaaaatcttcaaggatttttccagcttccataacagctgacgatatgtactctggagatacaccggctgcttcagcggcatctgaattgtaatttgcgaggtacttttcataatcctggggcgtatattgacttttcacttcttgagcagatgctgcgcctgaaggcaataccaatccaagtgtaacaaaactgataatcataaacagaaccaatcttctcattttgacactctccttcataagatttttgaaccaaaattaaggtaacatagattgtctgttcgtgaacataatttaacatatttgaaaaataattgattccaaatccccacttgtaatattttccgttgcgggactttttcggtcatggactattcataataagatgaaaatttgacacagagaacaaaatgttcatgtgttaaatgctgcgggagcagaaagggttttccgatttcctgccgatctctcatcggcggaaaaatcgggtcggcatgttgccgacaagtggcacgaactttcgatgcgatagcgagaatgagagagccaccggcaccgcaggtcgcacgtccaaattgaatccgtaggaacaatttggtgtagtgcgttacaccaaaactgaaattttgtgttaccataaccctaatagagtggtatgtattggggggttcgtgtggcaaattatgcggttatcaggatggaaaaatacaagaaagatagactgaatgggacgcaaaaacacaatcagcgggagtttcaaaaaagcaaaaatgaaaacattgatcgtggccggtcgcatctcaattatgatcttgttaacggtcaaccgatcagctacgcacaggcggttcgtgaaaaaattgagggcagggtcaaacggaaagtgcgggacgatgccgttttagtgagcgagtttttgattacggccagtcctgactacatgaacggattgagcgagacggagcagcggcgctattttgaagcggcagtggatcatctgaaagagaaatacactgcggaaaatatgttgtatgccacggtacatatggatgaagcgaccccgcacatgcatgtcgggattgtgccgatcaccgaggacggccggctttctgctaaagatttctttaacggcaagctgaagatgaaagctattcaggatgattttcaccggcatatggtgaagagtggttttgacttggagcggggagaaccaagcgaaaagaagcatgaaaatgttcaccagtacaaaatcaatcagcggaaagcggagcttgagcggctgaacgctgagatcgctttgaaggaaaaacggaaagcggaattggaacagcagaaccgagcggtcgaatcagtggtttccgtcaaaaaagaagcgctgacggccaaaacgcaagagcagaggatcccgaccgttgagtatgaaaaagccggtcttttcaaaaaagacaaggtgattatgccgcagcatgaacttgaaaatttgtatgcttatgcggaagatcaagggaaaatggcggcgcaactgtcgcggcaacttgaagcggaaacggaagagaaggaacggtggaagtccatagctggcgaagaaagggagcgggcagattcgaaagataagatgctctcggatctgcagacaactatgaacgaggaggtcgaaaaagcaaaaaggggtatgcggcggaagctgactaaagaatttacggaagagcagcgggaagaactccgtcaggaagtgaaagaagagctgtctgctctgaaaacagaaaacagcgagctaagagcggagaatatggatttgaagcggcttacgctgtctctgagcgaacaaaaagacaatgaggtcaaaaagcacgccgaaacgaaaaaaagccttaaagcggaaagaggcaggtatggtgagctgctgaacttcgcccaagagcagaataaggagtttcagtcgctgaacgaggaaaataagacgctaagagagcgggtggccgtactggaacagtggaaagacaaaatggtgcagtgggctaaagagaagttgccaagggtgcggagattagcggtttcatttttcaatgcagcaggtatgcgtcgagaagcagctaaatataaggacaatgaattggagcgataaatggttttcattaactgcacccattaactttacaccatcaaaagcttgaacttattgatataaccaagttttaaaggggccaattttgatttgttttacagtttgttttacaaatgttttatcagaagaagaaataaagaaatataaaagaataagagagcgtggtgtgcatatcagttatcctttccaaaattgccaccactttttttgtttagtggctgcgatcattctttgtgtctccagagactcccgtaatgcggcggtgagtgtctcatgtctttcttgctgtcttttttcgaattgttccatccgttctgccatctggcggttaaattcttcctgtcgcttcatgaattcaaccaaaggattgtcctgtagcgatgtagcggtatccgatatggttagttttgaacgatataggcttgctatgtgctttaccgtttcgtcgagtgagtgtccattgatcttagtcattgtacatagatactctaaagtctttacgtcatcctcggtatagagtcgccatcctttcgaatctttattgaacgagtagccttgttcttcaagcatactggcatacttgcggacagtcaccggctctataccgaggtgttttgcgacgtccttggacgataatttgactcccatatccatcacgaatcacctcgtaaaataggttcgctatggcgaggccagacaccttcaagtgttgcaccctttattatgtttgagttgttttgaaaagggtgcatttcaaaaggagcgctgcatacctaaactagaggaaaaacccagtcatgacaggggactgactgggttcttttgtgtttgagtttgttttggaatttaggagcgttcacggagtgcccagttatacgcaccaaataaattgggcgtactggcggaaatgacccgcaggggcttttgataaagaggaggggggtagtaatgcaaaagattgattttgaaacagggatgaaatatgtaagagcaaccctgggctttgagggtttagtgctgacggcagaagaggaaaagcttttagaaaggcggtttcatggagaaatcacagaagaagaatacataagaaaagcgctggagctgtcttatctctaaatgggcagcgggcgctcttggcgtgagtcaacggtaaccggaccgtagggaggattaaggagttgactcactcagcgccacccgaaccctttcagcactcaaacaaacccgtttgtttgacgccaaccggcgagggagccccccgaagattcggggggttggggggattgagtattggcatccaacggccatccgttggtgggtttgggcaaagcccaagaacttgactagtgaattgggactaagttactcttgaaggagaaaaaagatcgggaaaaatagttggtgagagaagggagcgtaaggcgacggcagtcgccgagcggcagcgatagcgaccggatcgaatccaaccgaatacccctcctatgctaacaggggggtagtaatcgtaagtgttaagcggaatccaaatgtgattccgtttttttatttcaagtatttgttgtgtagtaatgagattcctactccggaaatttatcgttgcggcatgtcgaaaattttccgcaacaaagttatcaatccttctcttatgctaccattttcataaaaagggttaaactggagggggacgagttttatgagtgccattccgtctgctactgtgggggttaaaattaatgattggcatgagtatataaacagatttgatgcaaaaaacgctgaaaaatgcaaagcagaagtagaaaaaatgatcgaggaaatggaagaggaccaagatttattactgtattatcagctgatcagttttagacatgatttgatgatggactatcttttcccgtcagattcttctaaaaagttggaaacttgggagtatttaagaaaatctgaaggggccggacagaagttaacgaagctgctgaaatactatgaccatttgtttagaggaatgtacgaatttagaaacggggattatgtagcggccattaatcattatcaaaaggcagaagctaagattgccagagtcactgatgacatagaaaaagcggaattttattttaagatggccgaggttttttatcacatgaaacagactcatgtttctatgtattatgtgaaaatgtcttatgataagtataagaagcatcctacatacaaagtaaatatgatcaaatgtctttttgttattgcaggaaactatgatgatttgaataaccataaaaaagccttggttcatttacaaatagctttagaaatggctgaagaagttggcaatgaattgatgcagacatttgcatatttaaatatgggcaatagctataaccgtttgcaaagtccaatggctattcctttgtatcaccaagccattaagcttgcaaaaaaggcgggggctaaagaaatcattcaggcttattacgatttgtcccttattcactttcagaacggtgaaatgatcgaggggatggacttttttaaaaaggcagtaaaggaagctgaagcgttcgaaaatgaattttacatgaaattgttgaatgtactaaaagcattatttattgatactgctaacagacaaaatgtaaaaaatgcattgtacggactaaagaccgaaaaaggctatccatactttgaagagctagctttagtggctgcagaattctatactaagaagaggcgcatggaagattctatatacttttacaatgaaatggtgtgcgctcaaagacaaattcagaggagtgattctcattatgaaatttaaaagtctttttgctgctgtcctcattttgggtctgttagccggcggtgcaggttattctgtttctcatggggaaatttcagttgcttctcgaaatgcaacataaggaaaatttaaggcctaaatggggcggactcttagagtctgctttttttattgcaaaaatcgttttaaagctttttaaggcgttttattgggttccctttataaaagggggcgttttttatttaaagcccgtagaaacgaatctgagcattctgaggacgcctttaggtatgcagattagctgttcaccttttttaagtagcgagtagcggagtgcccacttacgcaccttatcgaaaggtgctcgttttttcgcaccggcgaaataaataatgctacgcatttgaccatggctggatgtgttgacagggtgttgatagaaaaggccatgcgctgactgtgtggaggttcatgtgttggtcatgtggagacgtgcggttttttaaagatattgaatatctaaaataatgcgcggctgcagggccgattttttgaaaaaaaatctccccctatggggaagaatggttttgatcttaggttttgggttttaaaaaaagaccggcaattctgccggccttttttacgattttgacggagtcgaaatcgggtcttttcttatcttgatactatatagaaacaacaagattttaaaaaatcacgttcagcccttgtctgtcaagggcttgagctaattttgacagataaaaactccatctgctattatttaagtaccaccaaaaataatagaatgctagaggactagcaacagaaggagttttttgtattctcccgatacggcgccagcaggaaaacgtctgaaggtgaaaacgccccgcgtttacggggcgatcgggaaagcaccggcagcgccgtgccatgaaatctctgcggctcatcgaagctgcggggcagccggattccggagccgaccaggcgccggcttttttgtggttagggcaggcaacgggccgccctggctgcagctgaaggagctccacggccgtcggctccgatgcggcgccagcaggagaacgtctgaaggagaaaacgccccacgtttacggggcgatcagggctgtaccggcagcgccgcgtcatgaaatctctgcggctcatcgaggctgcggaggcgacaaggttccggctttttttgtgtcctggtcaagcaacgggccggccaggcgccggcctttttgtagcctgcaccaagcaacgggtcaccctggatgctgaaagagatccgccgcgtcggcaacagcaatacagcaattgcaggaagaacagctgtgttgaaggcgaaaacgtctcgtgtttatggatgctctggtagcctgaaaaaggtctacggcagatgatatttcactctgctgtcggctggaaaaatatcttgtgttaagttgataagcaacagcgctcttgtgggagtgtgtaaggtctaatggattatgtattcattatctgatcctttcactttgactaataaagattcattcgatttgaaggtttagataaatcgtcttggtaataaagtcatttttcgacaaaaaacgtcaattttcaagtgtgtttgtcagaataaaatggtaattcgggatgatgacccattgaatttttacatttagtataaaaagggtataaagtaataattgataaggaggtctatgtaaccaagatagtgaaaaaagatgagagtcaataatttcagtgaaaagaagagatttataaagataaagagtattctactaattgactcaaaaaatatgcgcaccaatcaaattgttgctactaaccttatcaaataaataaaagttactgatcattcatcagtaactttttattttgacttgtcataggaggaatagacaaatgaagaaaaaaataggcgttgcttctgccctttctgctgtgcttttattaggcgcatgcggaggacaaaatgattcttcttcttcggagcaaccaaataagaagaatgcatctgtaacaacaaaggataatgaggaaagccaggcctcttttaatcttcaaaaaaacgatggccgcgatgtatctaatgtattcaatccttttattaaagaagctgtagagggagatgtagaaacagtatataagaatgctgatcctaaaatcaaaatcaattttgatgggtttaattttagtgtttctcaatatcaagtcgttcatatcaaaaacgctaagaatgcaccatacagctttaaaggagggaaagaaggatatgttattacgctacaagctactataaaaaatcaaacagatggaaaggcatacttcaataatcctgttctccagggaagagatgaatatcatacaacgcaaccagatataaatttggttaaagatagtgacaaaatcaagcctagtaagagtggaacccctggatcgccagcttattatgaaaaaggtgaagcgaagactggttttattcaatatgaattatcggcttcagaatacaaagagtttaaaaatgaaaagacaaaactagtgatttcccctccttcaaaagattctatgttccgcgagcatatcggtgaaaagcaaacaagggatctcccgctgtctaggaattctttggaaatacaaaagagcgataaaaaattttatgaggatcagattattcgcaaaggtattgccgaaaaaaccatgatagaactcaaagacggtttggctgacaagaaaagtgaaaataaagttgaattgacactggaaggctttcaatttactaagttagctccttcagttagtttcaaaaaatcttttactggttttgggaatgaggatattgttgcagctacctttaagttacatataaaaaacaatcaaggtgacaccctgccattaggacagttcagctcttttttagacactgacaagcgacattatttaaatcaaggatcattagagtatgattcaggagacctccggccaggacagtcaggcacaaaatatttagtgttcttgatgaaaaagtcagaacttaacgaaaacccaaaattcaaattgcgcattagacatattgaaggaaatagtggtgacgcgttaaatgatcgagaggttgactttaatctggttcgttaatcgaaactgaagagctctctattaactacaaaatcatgattgttctcattagacaaacatgataaagtagaaaagtagaaaagtagagaaatttaaaagttgttgtttctaagggatcaactgatcctttaaggaggtgattaaatcgattctgaaatacggacaacttaatacttcggtttcttttattgatacgagttagaattttccctcttttcaaaaaccacttatcttaaaaagaggagaaatgtatatgtcaataaagaaactatcggtgctgtttagtatttttttgattgctttgagctcgatcttctcgtttgcagggaacaaagcttttgcagattcatttgcgggagaccctaatactaaagttactggatgggcgtttgatgagagtatcggcggatacctgcctaccgagcaaatcaagtcagtaagtgatccgaccagatttgcctattgcctggagcctggaaaacactctcctgaccatgtagatatgccatctgcaggacaaatgaatgacaaggtatatcgggttctgtcatatggatatccaaacgctacagcgagcgaattaggagttagtagcaatgccaaggctcattatgccacgcaaattgcaatttggcttacaatcggtgaggtgaaagcttccaatcttacctacagtgacaatagcatcgaaaaggcggttcagcaccttttaaataaagctgcaagcgaaaaagatacacagaatgtcagtgttacagtaactccggacaatgcgaaagcatctgtgaaaggagactatctcgtaactgagccgtatacagtaaaaagctctgcaacaggtacatacactgtttctttgtctggtgctccaaagaatgcagttgtaacagatgtaaatgggaaagtaaaatcaacattttcagcaaacgagcagtttaaaatccagttgccaaaaaatactccgacagacaaagtcaaagttactgttaatactgaaatgaacaagcttgtatcaatgcaatacaattcagatgggacctatcaaaacattgtgtctttaaaagaggttaaaaagaatgttgaggtcggtgtctctgcttcatgggaaacaactggcgcccttcaaatattaaaagtgacagaggacaatgcaccgttaacgggagttatctttgacatttttgatcaaagtggtgagaaagtaacttcagttcaaacagataaaaacggtaaagctactgcttccaaattgccgattggtaaatatacagcggtggaaacgaaaactgctgagggtttcattttagatcaagagcccaaaacagttaccgtaaatgcagatgaaacaactacactttccatcataaacaaaaaaattcgtggaaatgttgaattgaaaaaaattgatactgatagcaagaattcattagaaggtgctgttttcgagctcttcaataataaaggaaaagcaattggccaatacacaactgataaagaaggaaaaatcctgattaagaatttagaatatggatcatattcatttgttgaaaagagcgcacctaatggctatgttttaaacactgagccaattaattttgaagtcaaagaaaataaaaaaactgtgcaaattcaagcagataacaaaatgattaccggctcgctagaaattacgaaaaccgatgtggcagacggtaatactcgcttaaaaggtgcagaatttactatctttaatgaaaatggtgaagaggttgccaaggggaaaacagataaagatggtatagctcgttttgataatttaccatttggccaatacacttataaagagacatttgcgccaaaaggatatttaatcaatgaggaaacattttcttttgagatcaaagaaaatggccaaatcattaaacacatggtggctgataagaaaaaagctgttgccgcagctccagttttcgaaaaagcttcacctgtcgtgaaaacagaaaaagtgcaaactgttgttaaaccggttcagaatactgtcaaagaagaacagccggttaaagaaaacacattgccgaacactggaaatcctaatcagtaccgagctgtaatgattggccttttcttaatcattatcggtgccgcatggtatttgttaaagcgtaaaaagacacaatctgatagtgagtaagatgacatagagagacagctgtttgctgtctctttcttatacggaggttttttaagacatgaagtctaaactttttcctgtttttttgataattgttggactgttggtagcttggtttgggggcggaaaagacataatatcgagcaagcagaaaacaaacacatctcttgctgaagcgaaagaaatcataaaagaaagcaagacagagaaagcttctgaaaacaataagcaagaaggaaaaaacgaatcattccaagtgaaaaatggtgaaacggttgggattctctctattcccaaaattgatgctgaactaccgattgtggaaggtactgcagcagaagacctgagtaaaggcgttggtcattataaaggcagcagctatccgaatgagaatgggcaaattgttctttcgggccatcgggatacagtttttcggcgcactggtgagctaaagcatggcgatactcttaaactaagtttgtcttacggagaatttgaatataagattacagatactaaaattgttgatgagaatgacacttctgttattactctgcagcataaagaagaagaattgatactgacgacatgttatccattttcatacataggagacgcaccagagcgttatatcatatatgctgctcctatttaattagacgcttatgattagacgcttatgaaatgtttatttgtattgacagacaggtagtggaaagataagatttacacaatgataagtcaatctccacaaggaaggtaagttttatgtctgcaaataatgaagtgatagtgactgcaaagatttcgaaaaaaacggacgatatgctggatgagttaaaattggaatcgaaaaaaaatggtgaaaaaaaatacaaaaaagaacttatggagactgcagttactgaatattacaataaaatttttaaaaaatagatactgtattagaaggaagctgtcatcaagatagcttcttttttaccttcaacagccagggcggcccgtagcctaccctggccggttccggaatccggctgtcccgcagcttcgatgagtgcggaatttcacggcgcggcctgtgctttcccgatcgccccgtaaacgcggggcgttttctccttcagatactctccggccggcgccgcatcgaaaccgacggccgcggatctccttcagcagccaggacggcccgttgcctgccctggccacaaaaaagccggcgcctggccggttccggaatccggctacccccacagcttcaatgagccgcggagagtccaccgcagaggcgctatttgtccctaacgaaggaaatatgctcccaatcttatctgcataccatatcgatctacagggcgacttcttaatctgtacgtactttttcgtttcagccattacgcaatctctcctcgtttttgttttcgttagaaccacgcatcatccacgccttcattgcgatcagcccgtttcagttcggcttggacttccgtaagcacacgcgataagacactttcgcgcatatatgaaaacatgaacgcaaagttacagcccggatacttcagcgtcggctttttctccgcgaaacatttatcgatgaatctccgcgtaacctcggcgccttgctcgtcgatcatccgctttaggtttttcgcctccatgccgcggttgttcgttacgtatggaattccgtaagtttctttgtgcttggcgtgcaggtagccgataaaatcgcgcgtattccacttggcgaccggcttatctactttttcggacatagacatcgctcccttgctccgcgcatctcgcaataatccgtagtcgcgcttcggctttttctaaatgtgttcgcagcacatccgcctcttgttcgagcgcttcaatgtgaccaagcaaacacgcaatatcacgaggagactcttcgataaactccgcatcgtgttcgctgatctcgatgtactttccgccctccgcgacatctatggcaactccttccgctcctgaaaggcacgtcgcataatacccttccaactcccatgtccattccgcgtcagtaattcgttcgactctttttcgaatttcatcaagacctgtcttcgttagtttaccgctcatcttccggcctcctcatgtaatgcttcgatttcgtaaataagccgccaaacgtgatgataaaggtgttcaggtacgccgagcttcagcgccgctattgattcgtttaattcgtatggtgtcggtcgcttcatacgtcgtcaccttcccaatgaccatacttcctcattatgctaattacctcttccgcataaggctcatcttgattaatcactaggtattgagggaaggattgtttatcgtctaccactcgatttaaagcgatttctacaccgagatcatagagggcttgttgctgttcatcggttccataccgagtaacatcctcgtttttaagaatcgtatatttactcatcgtgcgttcactccttcgattttgattccgagaagattgagcgtattgataacgccatccctttcgcattcaagactgaacgtaacgccccgggattgcgcagtccgttgcttttcctgaagttcgtcgtaatactcgcgtacccggtcttccggtgtaccttcgatctcgtatccgttaattaacgcagccgctaatgtggtgacgtccatatcgtcgaaagtgtgtccgtcataccagcgaggagcgtgcctcgataggaagtccgcatgtgcacgtaatatccaatcgtcttcgtgtccgaaccctcttgccgattcgattgcctccgcctgttccttcgtgattgtcggcttcattttagcgcctcctttgcgtgtaaattaatttcatatagcgcagtaaccggaaccaaatcgacgctttcttcgggtaactgcgactttatttcgatcaccctcaacgccgccgtcaaccgctcattctcgccaatcaaatccgccacagcacaacgcaatcgtttaacttcttcggtcatgttttcgccgcctctccgccgttttatcgtctaccctaccgaataccctcgaccgtcagtaacgccgctaattcgccgcgatacgcacgtttattcgtgctaattccgccagcgattgcgcatccgaagacctcaaccgccgattcattacgtccgtcagcgcgcgttggtaatcgggtgataccggaatgttaatcgtcatgctacaaccgccgtttcctcgtcgttaaaagcaccggccatttcgattaaatatagaagccggtctgctgcgttcgacgtataattcgtaccaatccacgcagaaagagagttcgggtcatttcgtttagataacgcccggtgaacaattgcgtggcaatttgggcacaacggtgcaatatttttaggatcattactacctccgagtgaaatcggacgaatatggtgccaatcgacaattggtgtactgtctacgccacaactatcgcatctaatacaatctccgtaagaagtctcaagcctttttacaacctgtctggttgactttctggttctatccgcgtcttctaacgatttttttagtgatctgaaagacttaagtgttcgcaccctcccctgcaaaactgcttcctttgctctttgtttgtatagattagattcagatgagggtttggatatctcatataacaaagacacaggcaactcttcaaggtactctgctatatttgaatgacggctaataagctcatacctatgaattagtctataagcatgacctctgctaattcctagacaggaggaaacccatactccgaataatccataaccatgtttagaaagcttttcttgcgcctcgtgcaattcttttccgatacgtgtgtatgcatcagaaacgattccttttatctgcttttctttttggaggataaattcccgtgtgtgtttatccaactcgttataaatatccataagacactccccctgtataagagtcattttgtgaacgctttttaccgcgataagattctattaataataaatatctgcgcgaaaggtttttaattgagcgctattatttattctttttaaagatattctttttaaagatattctttttcagttacaggatagaaagtttatatatacagagctgtaaggttatatctacgcttctgtaagtttagctcgaaactctttaccgaaaagggattcggctccttcgatttcttctgcgatctttttcaacgcttcagcaattttcggctcagcccaccggaatttctcccgatctaatgggtcattgacgatgtaaacgattttgtcacgccctcgtccgctcggctttgtctcaatttcgactagcccggcttcctttagtattgcgtcgagtatcttaagcgtcgaatacgaaaggttaaacttttcagcaacacctttccggccgcgccacgactttccatactcggaatcctcgcgattgtgtctatagcgtagcagaaacgtatagtacagcgttgccttatcgcctatataaccgtggtacagatcgaatagttcgtggtaaaccatcgaaaagttttcgcgtgtgttgccgcttcgtatgaatacgtttgtcatgccgcatcgactcctctcttcatttttatttcctcggattttagttccaccaaaaacgagtttaaccgagaaaccagttcgttgtttccgtttttcaaaagcgacgggatgaactcgctgatgtgtgtaagagtaacgttaggatgtgcgaaactaccttcggactctttggcgtaaatgatcgtaagatgatccgtatggcgcaaatacttgtcgaacgttttactagcgcgattaaatgcggtattctcgcttaacttagcatcgatccatttagttccgtcaacaatgaaatccgggatgcagtcataaattcgcttttgttcctcgaccgatccgggatgtagcgccttgagaacttcaccaacaagcaactcaaattcgcgtcccttcgttatatagaaagatgcgtaagattcgttgataagttcgtatgacaatccccattcttcgcataatttcctaacactatggtcgtaatatttccgtaagtaattttcgatgtgccacagtttatttccgtaaatatactcgcgtctcaaaccatgcggaaacgtagctctaacgtaggcatccagcgcctctttttcgagattttcaagaaccccttttctgtattcgcgaaactttgtatctgaaatgttgtacaattcttttacttcttcagaaataaatttgttctcggatactgtatactcgtcgtcgatgtagaaacatctttcaatttccagatgagaaggttctgcgacttgctcgtagagaccgtatgcaattagagagtctttcgtaccgccgaaagccctctccagacgctttctcacagcgttgtaattatattttgtggagttcatcaactcctcccttaagttagttacatcaatgccatcatctattaagtcatctataaggagcaatgcgttttcttgtgtttgtgtaagaaccatctttttcacctctcatatataactgcgagtttaacttccggaatggcacatcttttctcgaaatttattccgtcacttatagatgcgtatgtacttcggaaaatggacaaaaaaaatagccgctgaacttaatcagcgacgtaaaaattttcgtattggtgagtatttattatgctgcgccttcacgtcagcgttactcatctgaacgtatttgcgcgttgttttaatatcggcgtgatcaaggattttctgcagcgtaaatatatcgccaccatttagtagatagtttcttgcgaaggtatgccggaacatgtgcggatgcaactcgtctaatttaaggcggactttcatacgattcaaccgtttcctaaacgcatccgcagtgaacggatctccatacgcattcataaatacttgatcgggctcgccgaaatattggcgtatctcttcgtaaagttcccggaccattcttccgacttctcgcgaaataggaatctcgcgttcttttcgattctttgcgatctgtgacggaaccaatacggacatactgcggaaatcaaattgcgatatatgtaccgaaacggcttcctccggtctgagtcccgtatctaacattaagtacatcaaaaccttatcgcgccactccgcaaactgccggtcatctaacgcattgaaaatcttaccgatctcttcatccgtcaagccgcgaacttctttttgctgatcatcgcgcaccggtttaactgattccatcgcattttttccggtaatgccttccgcataccaaaaacggcacatcgtctttagcgttcgcaagcgcatattaatcgtattgacggacaatccttcgcgctctattacttttcggtgttctgcgccttcatacggacgccggtctttccgcaggtagttaatatatgcgcgaataatttgcgctgttagagcgttaatgtcctcgatgacttccggatattcctccgataaaaattcgcgcaaatacgaaatgtggtgccggtaatctttaatagttcgaggccggagtccttccgcttcttttgcttgtacgaatatttccaacgcctcttctagcgaatatttaacgtcaacgggcatacgtcggtcttccggagaccgttggactcctcgattagccgtcggacgtctttccgtaataaattttcgtgccacgtctattgcgcctccttaatcgttcggtcgggcgccatttgatcctacgtacatgacagcgttagtcctacgtacaacgaaaaaacccgctatgtcagcgaatatgtcctcgttgattcaacgtagacaatccgcaatccataacgggtcatgatgggtacgtcccaggagagattcgaactcccgaccgacggcttagaaggccttacgcaaacaccaagattggtccggtaaatactgtccgcatcgtgtgttagcggaaggccgttgggaagccgtaaaagcggcaatcgcagcggaactcaaagcgctcggcggcaagtcttccgcaagcaagccggccaaggcatccggatcgacatacaccgttaagaaaggcgacactttgtccgaaattgcggtgaaaacaggcgtcagtatggcgaagttacaagcatacaatggcattaagaacgcgaataagattacggtcggccaagtattaaaactgacgggggcggccggttcttctaaaccgtcatccagcggtaagaaatacgtttaccttccggcgtctgccgactcatggcgcatctatcctacgaataaagcgccggtcaaagggaacgaaattaactatttgcgtccgaaaaaattcggcggccttaaatacgaaatccttgcgaatccgcaaacggacgtttacacgatcaagacggatcagttcggaaaggtaaatatctatgccggaaaaataacaggcgcaacagtaaaataaacgaaaagggagacgatgattatggaagaagtattgattttcgcgactatcctcgcgcccatcctaacggcgctcgttcagctcgttaagaaaacggttaagctgccgacgaatattgtgccggctctcagcttcgtcatcggtatcggattgggcgcgattgcctatccgtttactgacctcgacttggtgctgcgtttgtgggccggcggctttgcgggtctagcagcgacgggtctttttgaaatcggaacaaagcgagagggaactacgaaatagaataacgaaaccttttgcgggcgcttgcgtatgaatacgtaggtgctcgcgtacataaaaactcattgcggatatgtttggcggcgtagtataattttgttaactcatataaaggacgggtggctcaacgtggaatataaaacggtgactgtaaggaaacagaaatttggcgcaggtcgaatagtatgtttgacgatcggtatcctgctcgttttattcggatttctcttaagcttaacgattatcggaataattgcgggcggtatgttaatcatcttcagtttaccgttttttgcgatggctaaaggtggcgcgaagtatacgtgtcctaactgcggatataagcataacggagtagcttcgggaagtgtaaacgcaacttgtagacgttgtaagcaaaacatcgctgttaattggattggtcctccgtctaaaaataaatcagataaagcgttataaaacgaagaagccccgtccttaaccggatggggcgttttttacgtttatgatatccgcaaacctcacgaaatttgtatcgcctttggcgtccttcacgcgaaactccttccgtatgtggtccacgtaatgtactgcgccaattacctcgcgtatgtatccatcgtcataaagctcgaatgcgagcggcgcaccgaactccatcgattcagcgaccgtcatttccatatcctcgagctgctgcgcatccagctgcggcttttcaactttccgtttctcttcggcttggcgcgctaggccggctctgtgctccggtaatataatgcgcatcgcccatcgtttatcctcgatctccacggcgaacacctccgcatttattatatgcgaatgtatgttcggatatcaacagtcaaaataatcctctcgatcgacttcgtatcccagcgaccttaaagcgcgctgtacttttacccacgttgaaatacgaggcgcataatcgcgatcattacacatgctcgtcattgtgccgtgacctatgccggccttttggagaacttcctcctgcgcgattccttctcgatctaaaaaccggccgaatcggctgcgtcgtttacctagtccaaacatcagacaacacctcctaaaatcagcgtgtccaaaaaatcggaaagttaaacgtaggcaaaaaactgtgatattggacaatccgtatcgcgtaacgtttattaaacggcaattacacggtagctaaacggtagggtgcgggtaggttcggcagagttgcgaaaaggttaccgcacttggtggcgacttccgtaacggttattaccgtgttaacctaccgcactttatcgcgtttaacgcccgtaacgaagccgtttacgaaatttgttaaggagtgagagagatgagcgaagcgaaacgaaggaacgacagggcggggctcacacgagcgttttcgttcgtgcctggtggattcacagcggcaggatttttcgatatgtctccggaggtagtcggcttgtacgcgttagtgggcggcgcgggcttggtttgcatcggagcggcttggctagaaggacgcttgttcggcggcaaatttgcgtatattggagacgcagtaaacgggctcttgcggttcgtcctacctgcgggctatgccgtgttgctactgcgttttttaaacgcgatatgaaacggttcttgcgcaatcttcacgccaaacaaacgctaaagtacgcttttgatgccgccggcctgtacgcagccaaacgcctgtctaacggaaaagaagcgcgccgatatccgaaaatccatgacgttgatattagcgaagaaagaacgcggtatgtatttacgttgcttaacggaatggacccgaaagaaatcgcgaaaaaggaatttgtgttccggcaagtattcggacgcaacgttgaactaagcggcgatctaaaacgctatgtattaacggtttatagcgccgagatgccggccgtattgcgctatgactttgcggagattcaaccggtcattgagcgtcacaatctcggcattatcgcgggcaaagatcgccacggtcggtatgttagcttcgatttgttgacgcaaccacatattcttattgcgggcgaaacgggaagcggaaagtcaacgcagctacggtcgatcctgacgacgctgataaaacagaaccggcccgaccggctacagttatacctcgcggactgtaagaaatcggagttccacgtattccggaaagtcgaacacgtacagtgcgttctaacgagcgcggaagatatacgaagaatgttacgaagcataaaacgcgaattagatgagcgcagcaaccttacggagcaattcgaaataagccatatcgatgagcttccggatgatcaaaaacgaccgtatattgtcgtctgcattgacgagtttcttctattaagaaaagacgccgagatcatggacgtattagcggagctcgtcgcgataggccgtacgcttggagtattcgcgattctttcgatgcagcggccgaatgccaagacgcttgatacgactatccgcgccaatctaaccgtaagcatgggcttcaagctacgcgatataacggaggcccgaatcgtcaatacgccaggcgccgagaagctggacgtaagcgggcggttcataatggcggccgacaaaacctacgaactacaggcgccgtatctcgaaatgaacgaggcgaaggcgctgctgaatccgtactgtgtaatgaagtcaccgaccaaagacgtaacgccaccggcagccgagccagaaatcttaacggaaaaggacgtgtttatcgatggcccttactaaccgagataaagcgatcattgcggatcttaataaatttcgcgtaatggatcgcgatatgattgccgagctacatttcggaaatttgcgcagaccaaaatacgcagccaataacgttctgctgcggttacttagagacggacatattcagcgatctacggcgcgccagccttacgtttactttggcggcgaaacaacgatgaaaaagaacagcgccaagatcgatcattttcttgcgataggtaacgtttataaagagatgcgagggcaggcgttggagtcgttcttggtggagccgaagtacggcgataaaggtacggtcgagccggatatatttgcgctatatcggcggacgccgttctttatcgaggtgcagcggtcagtctattcggaaaaacagatgcgcgaaaagttagaccggtacgaagcgtttttccagtcgggcattattgcgctggaaccgtggcagaatccggagcggataatgtttccgcacgtattgattctgtcggatacgcgatacggattgccttcgtttccatttaaggtattccaggcgccgacctttactgcgtttattcagtcgataacaaagccgcaaccgcaaccgaccagctaaatttcgaaaagttcgtttgcatccgtaatctctaacgccaatacaattcgttcaagcgcgtccgatggatagcgcttcgttttattgttgcaaagttcgctaatcgttcgcgtagacagaccggtcatgacggcgaggtctttttgttcgatatgacgttcctttagaatctctttaagccgaagcttcatcgttaacacctccggttcgattacgttaagtataatttatttcgctgaattacgcaatatgtaattgacaatttcgtaaaacgtaattatacttacgttaaacataagttacgggaggcgaaatctatgcattacttagcggaacatcaaacgttcgactcgacggctcaacttaacgaagctgtttacgaacatatcaagcgcaatacatacgagcttaacgatacggatcgccgggcgcttaaaatgatcgcacgttacgcggtcaagtttagcggagcggcgcatcttaaagcggaaacgttggcgggcctgatcgataaatccattaagacggcgcggcgggcgctgaataaactagcggggctcggcatcgtaaagaaggtcgctacgacgaggaagatcaacggaggcaaaggcgcgaacatcatcgtgatcctgccggttggaagctgcgaagaaaacccgaaggacacgcttttgtccgaggatgaccagtcgacaatgtccaatcgcggacaagccgaaaagcctacggaatcaacggttgaggcgccgaaaacgaaaaacgaaccatcggatttaattaagcgttctaaaaaccaaaataacgtattagatacggcgacagtcccggctgaggcgttaaaaggcgcgttgcctaacgaaatctatgacgcaatggctcgttactttgacgcagataaaatttataaatactacggaattcttttgcgcgctaaggcaagcgtagacagaacgatcagactcgaagaacatgcggcgcctttcgttgaagcgtggcacgcaacgattatgaaagcgaaatcgcacgaaattaagcgtttcgacgattacctatacgctgggtttaggaaggcggcttggacggttaaggcgcgcttaaatcgtggcggatcgcttatggaacgttttaggaaggcgtttgaatctgcggagtgacctacgtttgacatagcgagtctcttctattaatatttgcgcttgactatttcgcctactattcgtaataatagagaacgtaggcaccattcgatcgtgaacgtaagactagcgtttgtacgtcggaccttgaaatccgattgaatcaacgttttgacataccgaagacataacgaaagcattattgtttaagtacaacaaaaagagccggcttaatggctcttttcttttgctaataaattagacattacttcattcacttttagattcactttcttaattgcatcagccgatggttgattcatgctttcaatcgttatacgatatttttctatttcaaacgattgctttgacgatgatttaacgaattcactcatacagcgctcacactctgctgttcttttttaatcaaatcatcgcaaagcttgttcaagtaatatgtatagttaacttttttcttcatcgaacggacttctgtgccgatctcttcacatatggagatcgggatactggatttgtttactttattcctatatgtatgtttcaattgtttttcagctatgttcttatatgtaaggaaatcattaatatgtacgaaataaactttgttttccggctctctaaactgaaatagaaaaccaggaattatgtttggatattgcgctgcctcttttaagtgtttaatctgttgtggcttgatgatcttttcactgaaggatacagacttgttctttgttgatttaagttcaaaaggaaataagcatcctttaaagtgcaggaagcaatcgtatttgttttttgatacagctgctccccttttcaaaaacattgggttaacatctttaattctatagaagaacagcttttgatctgcagctgatttttctatatttgcttcaaaaaccttgccttggtttgtacctcccaatcaatcactctcctaaaatattgaaaccaaaattgatattaaaataaacctttgttacactgttttatgttaattaatattgaaagaagtgtacgaaatgaagcaatggacacccctacgccctcgtttaaatgaattaatgtttgaatatgacctcacagttgatgaccttttcaaacgcacaggatatccgagacaacgtatccacgattatataagtggagccaaagcaaatatgaatttagctacaggcatgacttttgctgatgccattggttgctcaattgaagagctgtacgaatggaaccatgaagcaagaagaaaagttaaatcttaattccttttcgagcccatctgatttcctgcatcaattcttccttattatccgaaaggttgattaggttacggtgggctctttcgtattctttgttctcgagagcttctttcaccgtacccatttgtctttccattttgttgaacagtatttgaattgttttatgttcttcagctattatcctccacctctaatcatctaattttatttttactctaaatagaagaccgattttatttagaattctctgttcttgaaaatgtcacgataagtaagtccagaaatcccacgatcctttttcgtttgttcattggcttctttccaatcattttcagttaaattggaaaacttatttttagatagcttaggtttcttgactgctttaagtttaataaaactaaccccctaaaaattctttaattttatttatgtcatcggtattcaaacaaatcgacactttcttactgtacttcttgtcttcaatagtcattaaaacatggtctcttcctttctcgaaaataactttatcttctttaggaaaagtacgacatttaaaaacttttttcattgaaacaatcctccccaaattactccagcagcaactgctacaataatcattgaaataaacttagctattccaacccataccatcaacttcatattgccttctgaatcccaatcacctaacacaactagaccaaatgcaattaacaaaacccaagctgttacaatcatctacttagaacctctttcgactgtgtaaccactagtaatgtcatttaagatcgtgctgcttggggacagcttttcactctcaatatctttatttttagtgtaattaatgaaatcctcgaactggatcaaatacactccgtaagctgtgttattcaatctttcaatggtatcttcactaggtttagaaaaccagctgtcagtaccttggccatacacttcaaaaatctgaattatctcgtccttatactcaaagtaagccagtttattttcaagttcacattcctcatcaactggatttcctacatgatttgtcgcatattccatcattgaagtaagcatgtagcctaattcaatgtccgagaaacttaactgtggtttaggtgttccataataaatatctgcttcatttagtgatcctctttggttcacttctttaatgatctcttcgatagctgtgtagccttcatgaatgatgaattccctacgttcctcatctcttcgtttatactcctctaataaacttgttaccttaaactctgtattcttcatctaattcctccttgtatgaaccgattatttctggtatccgttgaaagaaagtaataatgcaatccctagcatcatgtgggtattcgcaatcaatttcggcacctgatatgtaaatatcatattggatgctgcatatcaggtgaggattatagggtagctcgtattgtaaatacctcttcaaattaggtaactgctcattgacaaacttcaagaatttcttttcatactctggaacctgttcatataatttttttacatgttcttcaattgtgtcggcttgcactttgtagagattctcgaacagtgctttgttgatatccataagttcacttaaagccttgacagctttctcatctccgctaagggtaactccccaccatttatccaaatgcacttaatcatcctttctatatagaatcaacattttattcattctccgaaaattgcctattaaaaagttcaatcgctctatcataggttgctaattgtgcgatgtgtttgtcaatattagtgccatttccctgtaatccatccgagatatataattgctgattgttttttaactttgattctaaattatctaacatgttacgaatacttgaaatttgattttctaatcgcagtttagcctgttctctttctgattcaagtataattaagtttctattttcttttgtcatattatattattctccttcagtataaaattagaatttcatttcatttgatttcaaatgtcttcagttcaaacgttttatacgtatcaacttgcttacctggtatctcatttactctaggatacatatcatagtcatatggatatccaatgcagttcatgtgaaagctcgttccttctttataaaactcagcttgtaaatgatcgtgtccacaaacccaatgttcagcattaataaatggcaaatcgaccatatagcagctgttaggctcaaacggagaataaggattgtgaacaggtgggacatgagatacaaatacatcaatatcagagttttcaagagtgtcataccagtccattgattctttccacattgctcgtaccccatcttctttgctgtatccattaaggctgatatagtttgaatcattagagacacctttgaagaaatcccatccttcatttccttttggaagataccacataacatctcctgcaaagactttccctttgtatgtatccgtagactttattaatggagtgacattattgatgtctgtagccttctgaattaaatcattcacccttcccagtgaatcggaatattttcgttgctgatttttactgagtaaataaagatcatgattaccatatgtgaagtaaaccttttcatactgctttgctacttcatcaagtacccacagtgtctgttgattccactcagtaaagtcaccggcaatgattaatacctcaccatttccattcgatattaaccttctaacaatctcccttgttcgcttttcccacttgatttggttattgttccaagggatccagtgattaatatgcagatctgaaacataatcaattttcattttatcccccttctttgtttaagtacgtgttaactcatgctccatgaccaattgacatttaaatcacctcacttcaaatttaatgtgtatattttcaaaacatctccacacaatacaattgtacaaacttgtttacatactactttaggagatgatcatatggctaaacaaaacagatcaaacaacagcaatgaattacttgtgcctcaagctgctggtgctcttgaacaaatgaagtatgaaattgcttctgagttcggtgtgaacttagggcctgagacaacaagtagagcaaacggatcagtaggtggagagatcacaaaacgtttagtacgtttagctcaacaaagtatgaatggccaatttcattaatgtatgaggggttaatcccctctatttttatactcctttcccaaacccgaacacccagatcatctcttctctcaaccatttataaattttttctctgacctctgtgtcatgccatccccactcttctgctaacaaatgaatatctttcggcaggtgtttatgtatttgaacaatagatgctgggtctggttttttgccataataatcataataacaatcgaaaatctggtcgtacgcatcttcgtctatccataaataatgacaaacagcacatcctgaaattccctttggacaaggtgttttaatcctatacctgccattgattttctccatagctcactatccttctctttaaaatacagattttatattaatttaaaagtgatcgttttcttttatcactgcctttcactcttgttttttcaaacattccgtcgtaagtccaatcatatccgctatactttttaaacaccgtcgtcttcaggcggctatgatacgtcactcaccgcccgcctcttcgcgtgagtcgtcgatgattttatagccgtatttacgcgcatctttcaagtatattgctgcaccgccggaaaaaggcggccaactgtcgtcttcaataactagtgctttgtgaaccccgctatcatccgatataaaatcgcccacacgaacctcagtcggctgcggagcgttcaagtattcgtcaggcaccgccaagcctagcgcacgtcttagcgcgattgctttaccaatgtgaacgttgaaacagtcggatggtgcggctttggcgattcctttcgacttcactgtgccccttcctaccgatttaaggagagcgacaacagtacttttctttttattaataacgaactctacgttacagacaatgcttcggtaaaaatatcgtaattctccatagaatgtcccaatatgatccgccaataacgatatctccaaaacgagatttataaccgaaatatttatcgtccttcttttcaaataccgtattcgcattattgattaccgtttgatttacgttttccattcctatctcctcctcgtttttaacttcgctattgacgatacggtacactcccgatcgccccgtaaacccggggcgttttcgccttcagatgctctcctgccggcgccgcatcggaaccgacggccgcggatctccttcagcagccaggcattccgtcctggctatgacaaaaaagccggcatcggcctgatctggagtcttgctgctcctgccgcaaggtctacgatctttccaagaggaaccattcccctatgcattcttgaacgccctgtaaacgtggtgtgtctttcgccgtcagcgtgtataccccttattgcctcgctgttcctgtgctgatggttcctgaaataaggatattccttactaaaaaagaaaagtaatgataaagttattcatacaaagagtgaaaagagggatttgaattggcagattttattgtgaataaggcaggagcaaaggtttataaagatattaataaacacagagtcttaaatgtaccagctttatcaaatgaaagtgagaaggggactgtatataatgttctttctgttggatttttaggaggacagagagaaccgattgtaactgttaaagaaactgatggagaagtggtagtataccgtttaccttatgatctagttggttggatagaaaattttatgggaatgaaacttcatggaatcgattcgtttccagcaaaagtggagtttggcaaattaaacggtagagtgtatgcagagattctgtaactgagggttaattaaggtgaatgaaataagttgaatcgttctgcttgttaacgtcaacaaactagaaggacagggctatgagtcactcggaaagagcgactcatagtatttagttaacatacaatcgcgattagaggcggtagcaatgccatttatgccagcgaattaataggtctcattctaatactaaagactttgcggtttgaacgagactgcttattcctctactatctgtcaaagtgaatggtttttcatacttttttgcaaattcttttgctttttctgctgtgggatgattgatatttaatttcatagtgattaacatgtcacaacttttaaccatactttcaagccgcttggtattttcattgccgtaagcatggatgagctctcccccgacactcgttattgctttttcaaattcactcgttctggtaccgcctaacactagtaccttttttccgttcaattcatttgttattgtggtggtatctaattttggatttttagttttataataggaagaaggagaaggtgcaacatgtttgatttcatccgtattatgtttccatatcactttgaaaacatctacattgtcactgtaataagctatatcaacaattgaaccgatctcaaggtcctcccttgttcttgtatcctcattgataagaaaagtatgtggtgcatcattatattttatggatttgatttttccgtcattatctaagtattcagaggcaactagcatagaatcgcgatttgacagaacacaataatttaattgaattcggtttgtttgcttgcgatttttgcccttttcaattaactcaaaatgaaatttttcatttcctaaatggactgctgaaattaaatctccatcttcaaattgttgttttcgtataatgttttcgggaacatataaattaatctcttctataattcctcctttcaaaagtcttttaaattcataacaatttatctgttttgctttttcgtctgtctcttttagttgaatatgttccacatttttttttgagcatggctctaattcatgagaaaccgatacttttaaagcagctaagctcttaataaaatgaaaataggtggataattcaccttcaatttcttccacgttgtccagtgtcagtttttgaattatctttcccatttcacaaacggcttcctgagcaatattttgtctgttcatggaaatcccctctctttaatttaataactgcactttaagaatacagtatctgcatgaggcatgatactttatcaatgaaaagaagcccttgataaagggctatgaattttaacgaataagatcgtgataaatgataaaaataattatataattgaactgcacacaatcatggccaatggtggtcagaccttttgccatattatcttttttttaaggagaagctgattttgaactcagtttctcctttttttatttgttttagcgcctgtgctaagtataaaagcattactaaaaacaaaaggataaaaacggcccaccagggcatatctgataccctagataacagcgcttctatgaaaatttgaaaactatttaacatttcttcacctcccataatattattatattagtttttgagaaaattacagaccgtttgttatcaagtaaagaaaccgcttacttgtgagggggaatgtatttattttgaaatagtcaactggtagtatatattacagggggtgatttgggggtgacgaaaggggcctcgaaagataagaatagatttactgaatggaaaagctctttttgcctatttattttccttttagacttaaagaagcttcctcttccttcagaagctttaaattgggaattgaataagctgagaactgaaattcgtttgatgcttgagaaacataacgaaataccaaatgaaaattaaagtgtttggtgtgattagttgaaaaaagggccatccagccgaagttaagatatttagtctttggcccgctcttatctggataaggaaaggagtaagaaggattttataggtgtgaatgttctgaggacaaggatgaactaagcttttgaaaataaacgtttccaaaaaccggatctttttttagaatcgacggcagctgctatttcgggatttttctgttctctattttcttggattgcctttaatagttggcgatctcttctttcaatttcattattcattttggattctaaaattgtaagaaatgtttccctttcctcttctaatgctgttttcaactgttcgctaatcagttgtcttagctcattgctagaaaggacaatatgtttttcattgctatcatgtaactcagtggagttatagtgttgatcctttttggcgactgtactcctaacagcattattaagtggcactgacgatgataggagttgctgaagtgattttaaacagttaatatcattttgaaaatatattcgttgatcctggtcgttccgtgtaaaagtgtagccggccttttccatttcaatagaccaccttctaagtgtagagggtgttatttttaatttatgtgccacgtcttttgaaaaaaagccatattctcctctatgattggtttcacttgtcataaaataaatcacctcagttatctattcaaccttatttttactatccctttaaatcctaataaaatagatatatttgagtggtactccaaaagaaaacgccccgcgtttacggagcgatcagggctgcaccggcagcgtcgtgaaatctccgcgtctcatcgaagctgcgggggcaaccggattccggagccgaccaggcgccggctttttgtgttctgaccagggcggaatgccctggctgctgaaggagatacgcggccgccggtcccgatacggcgccagcaggagagcatctgtgttctttgaaaactagataacagaagtaattcacattcaattgtaatgcaagatatcacgtagtgattctttttaacggttaagttagaaagggcgcacggtggatgccttggcactaggagccgatgaaggacgggacgaacaccgatatgcttcggggagctgtaagcaagctttgatccggagatttccgaatggggaaacccaccactcgtaatggagtggtatccatatctgaatacataggatatgagaaggcagacccggggaactgaaacatctaagtacccggaggaagagaaagcaaatgcgattccctgagtagcggcgagcgaaacgggaccagcccaaaccaagaggcttgcctcttggggttgtaggacactctgtacggagttacaaaggaacgaggtagatgaagaggtctggaaaggcccgccataggaggtaacagccctgtagtcaaaacttcgttctctcctgagtggatcctgagtacggcggaacacgtgaaattccgtcggaatccgggaggaccatctcccaaggctaaatactccctagtgaccgatagtgaaccagtaccgtgagggaaaggtgaaaagcaccccggaaggggagtgaaagagatcctgaaaccgtgtgcctacaagtagtcagagcccgttaacgggtgatggcgtgccttttgtagaatgaaccggcgagttacgatcccgtgcaaggttaagcagaagatgcggagccgcagcgaaagcgagtctgaatagggcgaattgagtacgtggtcgtagacccgaaaccaggtgatctacccatgtccagggtgaagttcaggtaacactgaatggaggcccgaacccacgcacgttgaaaagtgcggggatgaggtgtgggtaggggtgaaatgccaatcgaacctggagatagctggttctctccgaaatagctttagggctagcctcaaggtaagagtctcggaggtagagcactgattggactaggggcccctaccgggttaccgaattcagtcaaactccgaatgccgatgacttatccttgggagtcagactgcgagtgataagatccgtagtcgaaagggaaacagcccagaccgccagctaaggtcccaaagtatacgttaagtggaaaaggatgtggagttgcttagacaaccaggatgttggcttagaagcagccaccatttaaagagtgcgtaatagctcactggtcgagtgactctgcgccgaaaatgtaccggggctaaacgtatcaccgaagctgcggactgttcttcgaacagtggtaggagagcgttctaagggctgtgaagcaagaccggaaggacttgtggagcgcttagaagtgagaatgccggtatgagtagcgaaagaggggtgagaatcccctccaccgaatgcctaaggtttcctgaggaaggctcgtccgctcagggttagtcgggacctaagccgaggccgaaaggcgtaggcgatggataacaggttgatattcctgtaccacctcctcaccatttgagcaatggggggacgcaggaggatagggtaagcgcggtattggatatccgcgtccaagcagttaggctgggaaataggcaaatccgtttcccgtgaaggctgagctgtgatggcgagcgaattatagtagcgaagttcctgattccacactgccaagaaaagcctctagcgaggtgagaggtgcccgtaccgcaaaccgacacaggtaggcgaggagagaatcctaaggtgatcgagagaactctcgttaaggaactcggcaaaatgaccccgtaacttcgggagaaggggtgctctgttagggtgcaagcccgagagagccgcagtgaataggcccaggcgactgtttagcaaaaacacaggtctctgcgaagccgtaaggcgaagtataggggctgacgcctgcccggtgctggaaggttaagaggagcgcttagcgtaagcgaaggtgcgaattgaagccccagtaaacggcggccgtaactataacggtcctaaggtagcgaaattccttgtcgggtaagttccgacccgcacgaaaggcgcaacgatctgggcactgtctcaacgagagactcggtgaaattatagtacctgtgaagatgcaggttacccgcgacaggacggaaagaccccgtggagctttactgcagcctgatattgaatgttggtacagcttgtacaggataggtaggagccttggaaaccggagcgccagcttcggtggaggcatcggtgggatactaccctggctgtattgaccttctaacccgccgcccttatcgggcggggagacagtgtcaggtgggcagtttgactggggcggtcgcctcctaaaaggtaacggaggcgcccaaaggttccctcagaatggttggaaatcattcgcagagtgtaaaggcacaagggagcttgactgcgagacctacaagtcgagcagggacgaaagtcgggcttagtgatccggtggttccgcatggaagggccatcgctcaacggataaaagctaccccggggataacaggcttatctcccccaagagtccacatcgacggggaggtttggcacctcgatgtcggctcatcgcatcctggggctgtagtcggtcccaagggttgggctgttcgcccattaaagcggtacgcgagctgggttcagaacgtcgtgagacagttcggtccctatccgtcgcgggcgcaggaaatttgagaggagctgtccttagtacgagaggaccgggatggacgcaccgctggtgtaccagttgttctgccaagggcatcgctgggtagctatgtgcggacgggataagtgctgaaagcatctaagcatgaagcccccctcaagatgagatttcccattccgcaaggaagtaagatccctgaaagatgatcaggttgataggtctgaggtggaagtgtggcgacacatggagctgacagatactaatcgatcgaggacttaaccatacagttcagcacgcaagacatcgatacggcgcggttactcttctcgctaactaaggatggcgtcccattgccattgtctgctgttaccgggaagcttgtcatgttcacggcggacggaagtcggttcataagaagcgtagagatcacggataaagtcgaaggtgttgcgcagtacgttctgtcagccgaagagatccgacacagtggcgatgtgcaggcggaactttacctgtattatgccaataagcaggcgctttccatccataagttttcgtttaccatcgacaaggcactgattgatacagatatcgtaccgttggcggaatactacgtggatgacttcgaagcgttgcgccaacaaatcaacgacttatacgacgaagtggtcgaaacagtcgaagagctgcgcaagaaattcgaagacctcgaaaatattgaaacgaaagaaggagcgcaagcaaaagccgatactgcggaaaagaatgcgaagtcctatacggacactcatacgaaaaggactgacaatccgcatagcgtaacgaaatcgcaaatcggtttggggaacgttgagaacgtgaagcaggagacgccggatggtgcgcaggaaaaagccgacaaggccttaacggacagcaaagcgtacacggacgaacacacaggtcggactgataacccgcactcagtgacgaaagaccagatcggacttagtaacgtcgacaacgttaagcaggcgcctctcgaccaattccgggcccatgattccaatagcatccgtcatacttcgcaggttgagaaggacaagtggaacggatcgcagttgtttaaattgacgcaggatactggcgcggcacagtacatgacgggcatcgattttaatacggtaacagataccggcttctattacatgagcggcgcaacgacggcattgaatgcgccggtaaataacaacggatatcttctcgttcataactacagcacgtacgcgtatcaggaatacacgtcatatagcagcaatgattcgacgtcttccggccggcggaaatttatgcgtaataaggtcgcgagctcggattcatggacgtcatggcgcgagcttgaatcggtagaaggggcgcaatcaaaggtagatatccacgccaacagaacggacattcacgttgtacaggcggataaagacaagtggaatagtccgtgggtcgcaacgtggaataacgttactttgattaacggcgcgcagcaaaacaccggctatccgtttaagttttccgttgcgaataacgaaattaaactgagaggcacgttcggctcgctgccggccgccggtacgacggtagcgaaattcacgtataagccgacgcagctcgtagatttcgtcgttcctacgattggctcttacgggacggcccggttcgcatttacgacggacggcgaattacggttcgatgggctttccgcaaccgactcggctagcgttacgcgtgtgtcctttaatatcggtatcccattatggtaaaggaggaaataagaatgcacgttttatactacgacaaaaatttcgactatgccggcgaagaagatatcgatgtagaagtgctgccgccaaacagtacggacgtattgcccgatccgtcgatcatctcgccgcgattcgataagaagaaaaacgtatgggtcgaggcggcgacggaggaatacaaagagagcattaagcccgatccgccggctccgaatgaaatcgagaatcttcaaaagcagatagcggatttatattatcttatcgcgacaggaggaaactaaatgacttggtatctccgtatcaaaaatctttacgacgccggcctctggacgaagaagcaagttcacgacactgtcggagctggccggataacgccggaagaatacgagaaaatcaccggggatgtttacgatccaaacaagcctcctatcgaagaaccttcggaagaaacaggcggacaggaggcgtagttattgaacggcggcgaattagacgtactcaaatattttttaacgcagggaccgttcgcggtcctttttacgtggctgctgatttacgtaatgaagtcgaacagggagcgtgaatcgcggctacaagatctactcgataaatttagcgataagtacgacgtcatcatcgacaagatcgataggctcgaagaaaaattccgcggaagagaataatcgaattaacgcaacacgcccgtcaggtgagagtcccggcgggcttttttaataccaaaaacgaaaaggggacgatttaatggcgattttagtgcgtaagaatctagtgtctgcgagtaagtattcgattaagtgtccgaattcaatggatgcgcaatacatcacatttcataatacggccaacgatgcttcagcggatgcagaaatccgatatatgatcggaaacaacaacgaagtgtcttaccatttcgcagtagacgatacggaggtcgttcagggcatcccgacagaccgtaacgcatggcatacaggagatggtagcggcgcaaattccggaaaccggacgtctattggcgtggaggtttgttactcgaaatcaggcggcgccaagtacgaagcagccgaaaaactggcgatcaaatttattgcgcaattgctgaaggaacgcggatggggaatcgatcgttccttcaaaactaaacaagacagggaacgttctgtttataagacccaaggtcttatattccgttaaaatccttagaaaggaggtgatccagccgcaccttccgatacggctaccttgttacgacttcaccccaatcatctgtcccaccttcggcggctggctccaaaaaggttacctcaccgacttcgggtgttacaaactctcgtggtgtgacgggcggtgtgtacaaggcccgggaacgtattcaccgcggcatgctgatccgcgattactagcgattccagcttcacgcagtcgagttgcagactgcgatccgaactgagaacagatttgtgggattggcttaacctcgcggtttcgctgccctttgttctgcccattgtagcacgtgtgtagcccaggtcataaggggcatgatgatttgacgtcatccccaccttcctccggtttgtcaccggcagtcaccttagagtgcccaactgaatgctggcaactaagatcaagggttgcgctcgttgcgggacttaacccaacatctcacgacacgagctgacgacaaccatgcaccacctgtcactctgcccccgaaggggacgtcctatctctaggattgtcagaggatgtcaagacctggtaaggttcttcgcgttgcttcgaattaaaccacatgctccaccgcttgtgcgggcccccgtcaattcctttgagtttcagtcttgcgaccgtactccccaggcggagtgcttaatgcgttagctgcagcactaaggggcggaaaccccctaacacttagcactcatcgtttacggcgtggactaccagggtatctaatcctgttcgctccccacgctttcgctcctcagcgtcagttacagaccagagagtcgccttcgccactggtgttcctccacatctctacgcatttcaccgctacacgtggaattccactctcctcttctgcactcaagttccccagtttccaatgaccctccccggttgagccgggggctttcacatcagacttaagaaaccgcctgcgagccctttacgcccaataattccggacaacgcttgccacctacgtattaccgcggctgctggcacgtagttagccgtggctttctggttaggtaccgtcaaggtgccgccctatttgaacggcacttgttcttccctaacaacagagctttacgatccgaaaaccttcatcactcacgcggcgttgctccgtcagactttcgtccattgcggaagattccctactgctgcctcccgtaggagtctgggccgtgtctcagtcccagtgtggccgatcaccctctcaggtcggctacgcatcgtcgccttggtgagccgttacctcaccaactagctaatgcgccgcgggtccatctgtaagtggtagccgaagccaccttttatgtttgaaccatgcggttcaaacaagcatccggtattagccccggtttcccggagttatcccagtcttacaggcaggttacccacgtgttactcacccgtccgccgctaacatcagggagcaagctcccatctgtccgctcgacttgcatgtattaggcacgccgccagcgttcgtcctgagccaggatcaaactctccgatattatctctctataaatcaagtacttttttaaaaagagtaaaaataaaatcagtatattatttctagtgtttagaatggtcgggaagacaggattcgaacctgcgaccccatggtcccaaaccatgtgctctaccaagctgagctacttcccgattttcaaataaattatggcgcgcccgagaggagtcgaacccctaaccttttgatccgtagtcaaacgctctatccaattgagctacgggcgcaataaaataatggagcggaagacgggattcgaacccgcgacccccaccttggcaaggtgatgttctaccactgaactacttccgcaagtaaataagtaatgaatggccaaaataaaataaaaataacagcaccaaaaaagaaaactctcatgttatttattcagtaatgctaagacggtgtaactctctgcttaatctaaagtaaaagcctatccaaaaaccgaaaattcatacggttcattatgacaaaagtaattatatcagggttttgatgaaagtcaataccatttaaaaattaatttataacgaagaaaacagacttcatcagaaaacctgctgcaattagcactaggtttttactgctttaaacaaaaaataacagttccataacgtacggaaactgcttcagatcaacgtattttagataagcttccaagcgggctcgaaccgctgacctcttccttaccatggaagtgctctacctgctgagctatggaagcaatggctccgcaggtaggactcgaacctacgaccgatcggttaacagccgatagctctaccactgagctactgcggaatattataagcttcataaacaaaaacatggtagataaaataaaaatttcaaaagtatgtatggcgcgcccgagaggagtcgaacccctaaccttttgatccgtagtcaaacgctctatccaattgagctacgggcgcagcaataagtgccgagggccggacttgaaccggcacggtagtcacctaccgcaggattttaagtcctgtgtgtctgccaattccaccaccccggcatggatggtataggtatagttggagcggaagacgggattcgaacccgcgacccccaccttggcaaggtgatgttctaccactgaactacttccgcgtttggcaatgcggatgaagggacttgaacccccacgtctgtaaagacactagagcctgattctagcgcgtctgccaattccgccacatccgcaagaaaaacatggtgagccatgaaggactcgaaccttcgaccctctgattaaaagtcagatgctctaccaactgagctaatggctctttttacaagagacttatatagtataacatataaaagtggtgccggcaagaggacttgaacccccaacctactgattacaagtcagttgctctaccaattgagctacaccggcctgatatgtcaacttatgtatgataggaatggtggaggatgacgggctcgaaccgccgaccctctgcttgtaaggcagatgctctcccaactgagctaatcctccgtatattacacttacgtgtaatgtattacacgtaagtgtaatatacggaggattagctcagctgggagagcatctgccttacaagcagagggtcggcggttcgagcccgtcatcctccaccatatttgccggcctagctcaattggtagagcaactgacttgtaatcagtaggttgggggttcaagtcctctggccggcaccatttttggacaagataataatataagtctttttaaaaagagccattagctcagttggtagagcatctgacttttaatcagagggtcgaaggttcgagtccttcatggctcaccatgtttacgcgggtgtggcggaattggcagacgcgctagacttaggatctagtgtcttatgacgtgggggttcaagtcccttcacccgcattatacaggatagttgtcctgtatgcggaagtagttcagtggtagaacaccaccttgccaaggtgggggtcgcgggttcgaatcccgtcttccgctccaactataccatccacgccggggtggtggaattggcagacacacaggacttaaaatcctgcggtaggtgactaccgtgccggttcaagtccggccctcggcattcattattatgcgcccgtagctcaattggatagagcgtttgactacggatcaaaaggttaggggttcgactcctctcgggcgcgccataataaaatatattggtggaggatgacgggctcgaaccgccgaccctctgcttgtaaggcagatgctctcccagctgagctaatcctccatcatataagtgacccgtacgggattcgaacccgtgttaccgccgtgaaagggcggtgtcttaaccgcttgaccaacgggccctggtatttttcatttgttatgtattaataattagtggcggagagcaagggattcgaacccttgagacggggttaccgcctacacgatttccaatcgtgctccttcggccactcggacagctctccataaatggctccgcaggtaggattcgaacctacgaccgatcggttaacagccgatagctctaccactgagctactgcggaatgaagtctgcctggcgatgtcctactctcacagggggaaacccccgactaccatcggcgctgaagagcttaacttccgtgttcggcatgggaacgggtgtgacctcttcgccatcatcaccagacattttagtgacatgtattattatactatgtatttcagaaaaagcaagagtttttttagaaagggagaacgcgtataaggtcgatagtccggatagggcgttgtatattcgaaaagaggatgctgagcttatcatcactgaaaatcgtcgccccaaaaccgacgagcgagtgttaatcacagaaggactatcgtcatcaggcgactataagactggcgatatctgcacggtacgaagagtagtagacatctacggtacgattaccgtgaaagaacactctaattttgtaatagcaagggaatacgaagtcggtacactcccgatcgccccgtaaacgcggggcgttttcgccttcagatgctcttctgccggtgccgatcggaccaacagccgcagacctccttcagcagccaggacggcccgttgcctgccctggccacaaaaaagccggcgcctggctggttccggaatccggctacccccgcagcttcaatgagccgcggagagtccaccgcagaggcgctactttgtgtccgggcaggcaacggggcgccctggcagctgaaggagatctgcggccgtcggttccgatgcgacgccggcaggagaacgtctgaaggagaaaacccccgcgtttacggggcgatcgggaaagcactggcagcgccgcgccgtgaaatctccgcggctcattgaagctgcggggcagccggattcgggagccggccgggtgccggccgttggtggagcctagcgggatcgaaccgctgacctcctgcgtgcaaagcaggcgctctcccagctgagctaaggccccgtattgggtaaagatggtgggcctgagtggactcgaaccaccgacctcacgcttatcaggcgtgcgctctaaccagctgagctacaggcccatctaccatatgaaagaatcaaagtaaatggcggtccggacgggactcgaacccgcgacctcctgcgtgacaggcaggcattctaaccaactgaactaccggaccatttttatttttggttgcgggggcaggatttgaacctgcgaccttcgggttatgagcccgacgagctaccgaactgctccaccccgcgatgataaaaggcgaaaatgccccgcgtttacagggcgatcaggaatgcaccggcagcgccgcgccatgctccgcgtctcatcgaagctgcggaggaaaccggattcgggagccggccaggcgccggcttttttgtggccaggtcaggcaacggatcgccctggctgttgaaggcgatcgggaaagcaccggcagcgccgcgccatgaaatctctgcggctcattgaagctgcggggcagccggattccggaaccggccaggcgccggctttttgtgtactgaccaggacggaatgccctggctgcagctgaaggagatgtgcggccgtcgggtggagcctagcgggatcgaaccgctgacctcctgcgtgcaaagcaggcgctctcccagctgagctaaggccccaaagtggtcgggaagacaggattcgaacctgcgaccccatggtcccaaaccatgtgctctaccaagctgagctacttcccgattgcagccagggcggcccgttgcctgccctagccacaaaaaagccggcgcctggtcggctctggaatccggctgtcccgcagcttcaatgagccgcagagatttcatggcgcggcgctgccggtgctttcccgatcgctcattactgcttgttgaagcagctttattatcttaccactcagcttcttttatgtcaacaactttttcaagttgttttcgaagctttttcttgttgtctgctgttcatcagcgacgaataataatataccatgggcgccatatcgggaccggcggccgcggatctccttcagcagccagggcggcccgtttcctgctctggacacaaaaaagccggcacctggccggctcccgaatccggtttcctccgcagcttcgatgagacgccactctcaatggtttggtggcgatagcgaagaggtcacacccgttcccatgccgaacacggaagttaagctcttcagcgccgatggtagtcgggggtttccccctgtgagagtaggacgccgccaagc
